(19) United States
(12) Patent Application Publication
(10) Pub. No.: US 2020/0002727 A1
(43) Pub. Date: Jan. 2, 2020

(54) MULTI-SITE SPECIFIC INTEGRATION CELLS FOR DIFFICULT TO EXPRESS PROTEINS

(71) Applicants: LONZA LTD., Visp (CH); PFIZER INC., New York, NY (US)

(72) Inventors: Marc FEARY, Suffolk (GB); Robert J. YOUNG, London (GB); Mark MOFFAT, New York, NY (US); Gerald Fries CASPERSON, New York, NY (US); Heather Laurence JONES, New York, NY (US); Lin ZHANG, New York, NY (US)

(21) Appl. No.: 16/486,363

(22) PCT Filed: Feb. 17, 2018
(86) PCT No.: PCT/IB2018/000232

§ 371 Date: Aug. 15, 2019

Related U.S. Application Data
(60) Provisional application No. 62/460,420, filed on Feb. 17, 2017.

(51) Int. Cl. C12N 15/90; C12N 9/12; C12N 15/86; C07K 16/28; C07K 16/30; C07K 14/55; C07K 16/24

(52) U.S. Cl. CPC C12N 15/907; C12N 9/1241; C12Y 207/07; C12N 15/86; C07K 16/2887; C07K 16/3007; C07K 2319/30; C07K 16/241; C12N 2800/30; C07K 2317/14; C07K 2317/31; C07K 2317/35; C07K 14/55

(57) ABSTRACT

The present disclosure relates to a site-specific integration (SSI) mammalian cell that comprises at least two distinct recombination target sites (RTS) wherein two RTS are chromosomally-integrated within the NL1 locus or the NL2 locus. The disclosure also relates to a SSI mammalian cell comprising at least four distinct RTS wherein two RTS are chromosomally-integrated within the NL1 or the NL2 locus and two RTS are chromosomally-integrated within a separate locus. The disclosure also relates to methods for using the SSI mammalian cell to produce recombinant protein expression cell lines that can express difficult to express proteins.

### SEQUENCE LISTING

[0001] The instant application contains a Sequence Listing which has been submitted electronically in ASCII format and is hereby incorporated by reference in its entirety. Said ASCII copy, created on Mar. 28, 2018, is named 0132-0028WO1_SL.txt and is 8,508,333 bytes in size.

### FIELD OF THE INVENTION

[0002] The present disclosure relates to a site-specific integration (SSI) mammalian cell that comprises at least two distinct recombination target sites (RTS) wherein two RTS are chromosomally-integrated within the NL1 locus or the NL2 locus. The disclosure also relates to a SSI mammalian cell comprising at least four distinct RTS wherein two RTS are chromosomally-integrated within the NL1 or the NL2 locus and two RTS are chromosomally-integrated within a separate locus. The disclosure also relates to methods for using the SSI mammalian host cell line to produce recombinant protein expression cell lines that can additionally express difficult to express proteins.

### BACKGROUND OF THE INVENTION

[0003] Biopharmaceuticals, both novel and biosimilar, continue to see high demand and increasing sales revenues. The increased prevalence of novel format, non-monoclonal antibody (mAb), recombinant proteins (rP), many of which may be classed as difficult to express (DtE) may pose challenges to the delivery of therapeutics in the biopharmaceutical industry. DtE proteins can be associated with lower than expected titres or problems with expression of multiple chains, ancillary proteins, product recovery or purification (Pybus et al. Biotechnol. Bioeng. 111:372-85 (2014)). Examples of DtE proteins include but are not limited to Fc-fusion proteins, bi- and tri-specific MAbs, enzymes, membrane receptors, and bi-specific T-cell engager BITE® (Micromet AG, Munich, Germany) molecules and selected mAbs.

[0004] One reported method for integrating recombinant protein (rP) expression cassettes into a host cell genome relies on random integration (RI)—a process by which DNA is introduced into a cell and incorporated at existing double strand breaks (DSB) found in the genome. Consequently, when using such a method, both the number of gene copies integrated and the expression characteristics at integration sites (position variegation effect) can be highly variable. This could be problematic for DtE proteins for a number of reasons. For example, for some multi-chain proteins it could be difficult to control the number of integrated copies of genes encoding individual chains or ancillary genes, vector size limitations could impede the expression of multi-chain proteins, transfecting multiple vectors could result in low integration efficiency and high expression of some DtEs could result in toxicity.

[0005] Another method for integrating rP expression cassettes is by using site-specific integration (SSI). “Landing pads” located in the genomes of SSI cell lines can utilize recombination target sites (RTS) derived from site-specific recombinase systems such as the Saccharomyces cerevisiae-derived FLP-Frt system or the bacteriophage P1 derived Cre-loxP system. In these systems, the recombination enzyme or recombinase is responsible for recombination events between donor and target DNA containing compatible recombination sites (Frt or loxP respectively) (see, e.g., Wirth et al. Curr. Op. in Biotech. 18:411-9 (2007)). By using distinct recombination sites at the 5′ and 3′ ends of the cassette to be exchanged (in both donor and target DNA) it is possible to ensure the recombination occurs in a directional manner and that only the preferred cassette region is exchanged. Thus, SSI may be advantageous over random integration approaches. The process of integrating cassettes in SSI cell lines is referred to as recombinase-mediated cassette-exchange (RMCE). Practically, cell line construction for recombinant protein production using RMCE generally involves co-transfection of an expression vector encoding the recombinase along with the targeting expression vector, containing the gene of interest (encoding the rP) and a selection marker flanked by recombinase targeting sequences.

[0006] SSI-generated cell lines that use a single landing pad can also have limitations. For example, such an approach usually, by design, results in a low number of integrated gene copies that could indirectly limit rP production recombinant protein expression titres. If production of multiple proteins in an SSI host cell line containing a single landing pad is required for rP production, all of the required genes might need to be included into a single vector. One method to increase integrated copies of recombinant genes is accumulative SSI (sometimes called stacking or multiplexing, see, e.g., Kameyama et al. Biotechnol. Bioeng. 105:1106-14 (2010), Kawabe et al. Cytotechnology 64:267-79 (2012) and Turan et al. J. Mol. Biol. 402:52-69 (2010)). With such a method, repeated rounds of RMCE can be used to load up a single site sequentially with multiple copies of rP expression cassettes. Landing pads in this type of SSI host cell line are not independently addressable and require repeated rounds of RMCE which takes additional time for each cycle.

[0007] Various publications are cited herein, the disclosures of which are incorporated by reference herein in their entireties.

### BRIEF DESCRIPTION OF THE INVENTION

[0008] A need exists to generate SSI host cell lines that overcome the limitation of SSI hosts with only a single genome insertion site. The present invention fulfills this need by using tandem SSI landing pads—where two or more landing pads are integrated at the same loci may overcome the limitations of cumulative site-specific integration. In such a system, the landing pads are independently addressable (due to recombination site and selection marker choice).

[0009] In some embodiments, the present disclosure provides a mammalian cell comprising at least two distinct RTS wherein two RTS are chromosomally-integrated within the NL1 locus or the NL2 locus. In some embodiments, the cell comprises two distinct RTS. In some embodiments, the two distinct RTS are chromosomally-integrated within the NL1 locus. In some embodiments, the two distinct RTS are chromosomally-integrated within the NL2 locus. In some embodiments, the cell comprises four distinct RTS. In some embodiments, the four distinct RTS are chromosomally-integrated on the same locus. In some embodiments, two distinct RTS are chromosomally-integrated on a separate locus. In some embodiments, the separate locus is the Fer1L4 locus. In some embodiments, two distinct RTS are chromosomally-integrated within the NL1 locus, and two distinct RTS are chromosomally-integrated within the NL2 locus. In some embodiments, the cell comprises six distinct RTS. In some embodiments, at least four distinct RTS are chromosomally-integrated on the same locus. In some embodiments, at least two distinct RTS are chromosomally-integrated within the NL1 locus or the NL2 locus, and at least two distinct RTS are chromosomally-integrated on a separate locus. In some embodiments, the separate locus is the Fer1L4 locus. In some embodiments, at least two distinct RTS are chromosomally-integrated within the NL1 locus, and at least two distinct RTS are chromosomally-integrated within the NL2 locus. In some embodiments, at least one of the RTS is an Frt site, a lox site, a rox site, or an att site. In some embodiments, at least one of the RTS is selected from among SEQ ID Nos.: 1-30. In some embodiments, the cell is a mouse cell, a human cell, a Chinese hamster ovary (CHO) cell, a CHO-K1 cell, a CHO-DXB11 cell, a CHO-DG44 cell, a CHOK1SV™ cell including all variants, a CHOK1SV GS-KO™ (glutamine synthetase knockout) cell including all variants, a HEK cell, a HEK293 cell including adherent and suspension-adapted variants, a HeLa cell, or a HT1080 cell. In some embodiments, the cell is a HEK cell.

[0010] In some embodiments, the cell comprises a first gene of interest, wherein the first gene of interest is chromosomally-integrated. In some embodiments, the first gene of interest comprises a reporter gene, a selection gene, a gene of therapeutic interest, an ancillary gene, or a combination thereof. In some embodiments, the gene of therapeutic interest comprises a gene encoding a DtE protein. In some embodiments, the DtE protein is selected from the group consisting of Fc-fusion protein, an enzyme, a membrane receptor, a bi-specific T-cell engager (BITE® Micromet AG, Munich, Germany), or a monoclonal antibody. In some embodiments, the monoclonal antibody is a bi-specific monoclonal antibody or a tri-specific monoclonal antibody. In some embodiments, the first gene of interest is located between two of the RTS. In some embodiments, the first gene of interest is located within the NL1 locus. In some embodiments, the cell comprises a second gene of interest, wherein the second gene of interest is chromosomally-integrated. In some embodiments, the second gene of interest comprises a reporter gene, a selection gene, a gene of therapeutic interest, an ancillary gene, or a combination thereof. In some embodiments, the gene of therapeutic interest comprises a gene encoding a DtE protein. In some embodiments, the DtE protein is selected from the group consisting of a Fc-fusion protein, an enzyme, a membrane receptor, a bi-specific T-cell engager (BITE®), or a monoclonal antibody. In some embodiments, the second gene of interest is located between two of the RTS. In some embodiments, the second gene of interest is located within the NL1 locus or the NL2 locus. In some embodiments, the first gene of interest is located within the NL1 locus, and the second gene of interest is located within the NL2 locus. In some embodiments, the cell comprises a third gene of interest, wherein the third gene of interest is chromosomally-integrated. In some embodiments, the third gene of interest comprises a reporter gene, a selection gene, a gene of therapeutic interest, an ancillary gene, or a combination thereof. In some embodiments, the gene of therapeutic interest comprises a gene encoding a DtE protein. In some embodiments, the third gene of interest is located between two of the RTS. In some embodiments, the third gene of interest is located within the NL1 locus or the NL2 locus. In some embodiments, the third gene of interest is located within a locus distinct from the NL1 locus and the NL2 locus. In some embodiments, the first gene of interest, the second gene of interest, and the third gene of interest are within three separate loci. In some embodiments, at least one of the first genes of interest, the second gene of interest, and the third gene of interest is within the NL1 locus, and at least one of the first gene of interest, the second gene of interest, and the third gene of interest is within the NL2 locus. In some embodiments, the cell comprises a site-specific recombinase gene. In some embodiments, the site-specific recombinase gene is chromosomally-integrated.

[0011] In some embodiments, the present disclosure provides a mammalian cell comprising at least four distinct RTS, wherein the cell comprises (a) at least two distinct RTS are chromosomally-integrated within the NL1 locus or NL2 locus; (b) a first gene of interest is integrated between the at least two RTS of (a), wherein the first gene of interest comprises a reporter gene, a gene encoding a DtE protein, an ancillary gene or a combination thereof; (c) and a second gene of interest is integrated within a second chromosomal locus distinct from the locus of (a), wherein the second gene of interest comprises a reporter gene, a gene encoding a DtE protein, an ancillary gene or a combination thereof.

[0012] In some embodiments, the present disclosure provides a mammalian cell comprising at least four distinct RTS, wherein the cell comprises (a) at least two distinct RTS are chromosomally-integrated within the Fer1L4 locus; (b) at least two distinct RTS are chromosomally-integrated within the NL1 locus or the NL2 locus; (c) a first gene of interest is chromosomally-integrated within the Fer1L4 locus, wherein the first gene of interest comprises a reporter gene, a gene encoding a DtE protein, an ancillary gene or a combination thereof; and (d) a second gene of interest is chromosomally-integrated within the within the NL1 locus or NL2 locus of (b), wherein the second gene of interest comprises a reporter gene, a gene encoding a DtE protein, an ancillary gene or a combination thereof.

[0013] In some embodiments, the present disclosure provides a mammalian cell comprising at least six distinct RTS, wherein the cell comprises (a) at least two distinct RTS and a first gene of interest are chromosomally-integrated within the Fer1L4 locus; (b) at least two distinct RTS and a second gene of interest are chromosomally-integrated within the NL1 locus; and (c) at least two distinct RTS and a third gene of interest are chromosomally-integrated within the NL2 locus.

[0014] In some embodiments, the present disclosure provides a method for producing a recombinant protein producer cell comprising (a) providing a cell that comprises at least at least four distinct RTS and a gene encoding a site-specific recombinase, wherein at least two distinct RTS are chromosomally-integrated within the NL1 locus and at least two distinct RTS are chromosomally-integrated within the NL2 locus; (b) transfecting the cell of (a) with a first vector comprising an exchangeable cassette encoding a first gene of interest and a second vector comprising an exchangeable cassette encoding a second gene of interest; (c) integrating the first exchangeable cassette within the NL1 locus and the second exchangeable cassette within the NL2 locus; and (d) selecting a recombinant protein producer cell comprising the first exchangeable cassette and the second exchangeable cassette integrated into the chromosome. In some embodiments, the first gene of interest comprises a reporter gene, a selection gene, a gene of therapeutic interest, an ancillary gene, or a combination thereof. In some embodiments, the gene of therapeutic interest comprises a gene encoding a DtE protein. In some embodiments, the DtE protein consists of a Fc-fusion protein, an enzyme, a membrane receptor, a bi-specific T-cell engager (BITE®), or a monoclonal antibody. In some embodiments, the monoclonal antibody is a bi-specific monoclonal antibody or a tri-specific monoclonal antibody. In some embodiments, the first gene of interest is located between two of the RTS. In some embodiments, the second gene of interest comprises a reporter gene, a selection gene, a gene of therapeutic interest, an ancillary gene, or a combination thereof. In some embodiments, the gene of therapeutic interest comprises a gene encoding a DtE protein. In some embodiments, the second gene of interest is located between two of the RTS.

[0015] In some embodiments, the present disclosure provides a method for producing a recombinant protein producer cell comprising (a) providing a cell that comprises at least four distinct RTS and a gene encoding a site-specific recombinase, wherein at least two distinct RTS are chromosomally-integrated within the Fer1L4 locus, and at least two distinct RTS are chromosomally-integrated within the NL1 locus or the NL2 locus; (b) transfecting the cell of (a) with a first vector comprising an exchangeable cassette encoding a first gene of interest and a second vector comprising an exchangeable cassette encoding a second gene of interest; (c) integrating the first exchangeable cassette within the Fer1L4 locus and the second exchangeable cassette within the NL1 locus or the NL2 locus; and (d) selecting a recombinant protein producer cell comprising the first exchangeable cassette and the second exchangeable cassette integrated into the chromosome. In some embodiments, the first gene of interest comprises a reporter gene, a selection gene, a gene of therapeutic interest, an ancillary gene, or a combination thereof. In some embodiments, the gene of therapeutic interest comprises a gene encoding a DtE protein. In some embodiments, the DtE protein consists of a Fc-fusion protein, an enzyme, a membrane receptor, a bi-specific T-cell engager (BITE®), or a monoclonal antibody. In some embodiments, the monoclonal antibody is a bi-specific monoclonal antibody or a tri-specific monoclonal antibody. In some embodiments, the first gene of interest is located between two of the RTS. In some embodiments, the second gene of interest comprises a reporter gene, a selection gene, a gene of therapeutic interest, an ancillary gene, or a combination thereof. In some embodiments, the gene of therapeutic interest comprises a gene encoding a DtE protein. In some embodiments, the second gene of interest is located between two of the RTS.

[0016] In some embodiments, the present disclosure provides a method for producing a recombinant protein producer cell comprising (a) providing a cell that comprises at least at least six distinct RTS and a gene encoding a site-specific recombinase, wherein at least two distinct RTS are chromosomally-integrated within the Fer1L4 locus, and at least two distinct RTS are chromosomally-integrated within the NL1 locus, and at least two distinct RTS are chromosomally-integrated within the NL2 locus; (b) transfecting the cell of (a) with a first vector comprising an exchangeable cassette encoding a first gene of interest, a second vector comprising an exchangeable cassette encoding a second gene of interest, and a third vector comprising an exchangeable cassette encoding a third gene of interest; (c) integrating the first exchangeable cassette within the Fer1L4 locus, the second exchangeable cassette within the NL1 locus, and the third exchangeable cassette within the NL2 locus; and (d) selecting a recombinant protein producer cell comprising the first exchangeable cassette, the second exchangeable cassette and the third exchangeable cassette integrated into the chromosome.

### BRIEF DESCRIPTION OF THE DRAWINGS

[0017] FIG. 1 is a schematic for a method of recombinase-mediated cassette-exchange (RMCE) using a multisite site-specific integration (SSI) host cell line with 2 independently addressable landing pads. The number of landing pads is restricted by the availability of suitable loci, incompatible Frt recombinase sites (e.g. wild-type Frt (F), Frt F5 (F5), Frt F14 (F14) and Frt F15 (F15)) and selection markers (e.g. green fluorescent protein (GFP) or Red Fluorescent Protein (RFP)) compatible with such a multiplexing approach.

[0018] FIG. 2A shows a schematic representation of the landing pad arrangement in a CHOK1SV GS-KO™ (glutamine synthetase knockout) multisite SSI host which contains two different illustrative landing pads (Landing Pad A and Landing Pad B). More details on the chromosomally-integration of these landing pads in single and multisite GS-CHOK1SV™ SSI hosts is given in Table 10. Landing Pad A contains a hygromycin phosphotransferase (Hpt)—enhanced green fluorescent protein (eGFP) fusion gene (Hpt-eGFP). The Hpt-eGFP fusion gene expression is under the control of a SV40 early promoter and has an SV40 polyA sequence. Distinct and different Frt sites are located between the SV40 promoter and Hpt-eGFP gene (F5) and 5′ of the SV40 poly A sequence (F) for RMCE. Landing Pad B contains a puromycin N-acetyltransferase-DsRed (PAC-DsRed) fusion gene under the control of a SV40 promoter and includes a SV40 polyA sequence. A different pair of Frt sites, distinct from those in Landing Pad A, are located between the SV40 early promoter and PAC-DsRed gene (F14) and 5′ of the SV40 polyA sequence (F15). The positioning of the Frt site between the SV40E promoter and selection marker enables it to be used in subsequent rounds of RMCE. Targeting vectors designed for RMCE in SSI single and multisite hosts contain a positive selection marker (e.g. GS) arranged immediately to the 3′ of an Frt site compatible with the destination landing pad (FIG. 2B). The remainder of the vector contains transcription units for the GOI (e.g. mAb) followed by an Frt site compatible to the second Frt site in the landing pad. Targeting vector DNA (FIG. 3A and FIG. 5) is co-transfected with a vector expressing FlpE recombinase (Takata et al., Genes to Cells 16: 7 (2011) (FIG. 3B). Transfected cells are incubated for 24 hours and selection pressure is then applied (e.g. removal of glutamine from culture medium). Successful RMCE is marked by the loss of the Hpt-eGFP gene and replacement with the positive selection marker gene (FIG. 2C). Cells appear dark under the fluorescent microscope or with flow cytometer analysis. Non-exchanged cells which recover in positive selection are easily removed by fluorescence-aided cell sorting.

[0019] FIG. 3 shows the pMF25 targeting vector (FIG. 3A) and pMF4 recombinase expression vector (FIG. 3B), used for creating DsRed-producing cell lines in the CHOK1SV GS-KO™ SSI hosts. pMF25 (FIG. 3A) contains a transcription unit incorporating the DsRed gene, flanked by mutant (F5) and wild-type (F) Frt sites. Transcription of DsRed-monomer is driven by the promoter of the hCMV major intermediate early gene 1 (hCMV) and its first intron (Intron A (hCMV Intron)) and the flanking exons encoding the 5′ UTR are denoted as Ex1 and Ex2. Glutamine synthetase cDNA (GS) and SV40 Intron A (SV40 Inton) are arranged immediately to the 3′ of Frt F5 and successful RMCE transcription in driven by SV40E promoter located in the landing pad. pMF4 (FIG. 3B) contains a transcription unit incorporating the FlpE gene (Takata et al., Genes to Cells 16: 7 (2011) driven by the promoter of the hCMV major intermediate early gene 1 (hCMV) and its first intron (Intron A (hCMV Intron)) and the flanking exons encoding the 5′ UTR are denoted as Ex1 and Ex2. In both vectors polyadenylation sequence and β-lactamase are indicated as pA and bla, respectively.

[0020] FIG. 4 shows the data from flow cytometry analysis of CHOK1SV GS-KO™ SSI host clones (7878, 8086, 8096, 9113, 9116 and 9115) prior to and following co-transfection with pMF25 and FlpE recombinase encoding vector. Green and yellow fluorescence was measured for the 7878 and 8086 (single site, Fer1L4 Landing Pad A), 8086 and 9113 (single site, NL1 Landing Pad A) and 9116 and 9115 (single site, NL2 Landing Pad A) pre- and post-RMCE (11 days of selection in glutamine-free medium) using a Millipore Guava flow cytometer. eGFP fluorescence was detected in the green channel and DsRed was detected in the yellow channel.

[0021] FIG. 5 shows the targeting vector for creating mAb producing cell lines in the CHOK1SV GS-KO™ derived SSI hosts. Vectors pMF26 (A), pMF27 (B) and pMF28 (C) contain transcription units incorporating rituximab, cB72.3 and H31K5 antibody genes (respectively), flanked by mutant (F5) and wild-type (F) Frt sites. Transcription of heavy (HC) and light chain (LC) genes are driven by the promoter of the hCMV major intermediate early gene 1 (hCMV) and its first intron, Intron A (hCMV Intron) and the flanking exons encoding the 5′ UTR are denoted as Ex1 and Ex2. Glutamine synthetase cDNA (GS) and SV40 Intron-polyA (indicated as pA in the FIG. 5) sequences are arranged immediately to the 3′ of Frt F5 to select for on-target integration following RMCE. β-lactamase is indicated as and bla, respectively.

[0022] FIG. 6 shows secreted Rituximab, cB72.3 and H31K5 mAb concentrations CHOK1SV GS-KO™ SSI pools grown in batch culture. CHOK1SV GS-KO™ SSI host clone 11434 (single site, Fer1L4 Landing Pad A) was transfected with pMF26 (Rituximab), pMF27 (cB72.3) or pMF28 (H31K5). Replicate (n>3) CHOK1SV GS-KO™ SSI pools were cultured in 8-day batch culture. Secreted rituximab (A), cB72.3 (B) and H31K5 (C) mAb (mg/L) were determined by Protein A HPLC.

[0023] FIG. 7 shows the data from flow cytometry analysis of multisite SSI hosts prior to RMCE. Green and yellow fluorescence was measured for the CHOK1SV GS-KO™ host (Host), 11434 (single site, Fer1L4 Landing Pad A), DsRed random integration control and six CHOK1SV GS-KO™ multisite host clones (12151, 12152, 12606, 12607, 12608 and 12609) (multisite sister clones with Landing Pad A in the Fer1L4 loci and Landing Pad B in the NL1 loci) using a Millipore Guava flow cytometer. eGFP fluorescence was detected in the green channel and DsRed was detected in the yellow channel.

[0024] FIG. 8 is a schematic of the vectors pCM9 and pCM11 targeted to Fer1L4 and NL1 landing pads in the CHOK1SV GS-KO SSI host. Vectors are as follows: FIG. 8A: pCM9 (E2 crimson expression vector targeting Fer1L4 loci). FIG. 8B: pCM11 (E2 crimson expression vector targeting NL1 loci).

[0025] FIG. 9 shows flow cytometry analysis of CHOK1SV GS-KO SSI derived cells targeted with pCM9 and pCM11. Multi CHOK1SV GS-KO SSI clone 12151 (Contains Landing Pad A (FIG. 2A) in Fer1L4 loci and Landing Pad B (FIG. 2A) in NL1 loci) was transfected with either pCM9 (E2 crimson expression vector targeting Fer1L4 loci) and pCM11 (E2 crimson expression vector targeting NL1 loci).

[0026] FIG. 10 is a schematic of the Rituximab expression vectors pMF26, pCM38, pCM22 and pAR5 targeted to either Fer1L4 (FIG. 2, Landing Pad A), NL1 (FIG. 2, Landing Pad B) or both. Vectors were as follows: pMF26 (FIG. 10A: Rituximab 1×LC, 1×HC expression vector targeting Fer1L4 loci), pCM38 (FIG. 10B: Rituximab 2×LC, 2×HC expression vector targeting Fer1L4 loci), pCM22 (FIG. 10C: empty expression vector targeting the NL1 loci) and pAR5 (FIG. 10D: Rituximab 1×LC, 1×HC expression vector targeting NL1 loci).

[0027] FIG. 11 shows cell specific Rituximab production rates (qmAb) of RMCE pools targeted with pMF26, pCM38, pCM22 and pAR5 following an 8-day batch culture.

[0028] FIG. 12 is a schematic of the Cergutuzumab amunaleukin (CEA-IL2v) expression vectors pAB2, pAB5, pCM46 and pAR2, targeted to either Fer1L4 (FIG. 2, Landing Pad A), NL1 (FIG. 2, Landing Pad B) or both. Vectors were as follows: pAB2 (CEA-IL2v LC, HC and HC-IL2 expression vector targeting Fer1L4 loci), pAB5 (CEA-IL2v LC and HC-IL2 expression vector targeting Fer1L4 loci), pCM46 (empty expression vector targeting NL1 loci) and pAR2 (CEA-IL2v HC expression vector targeting NL1 loci).

[0029] FIG. 13 is a schematic of SDS-page analysis of RMCE pools expressing Cergutuzumab amunaleukin (CEA-IL2v) following transfection with pAB2, pAB5, pCM46 and pAR2 (FIG. 12). A: Image of a 10% Bis-Tris protein gel generated under non-reduced conditions with lanes 1-9 labelled. Lane 1: Seeblue Plus2 Pre-stained protein standard. Lane 2: Analysis of mock (empty) pool generated by transfecting an empty version of pAB2. Lanes 2-5: Control pools generated with vector expressing only two of three the chain required to generate CEA-IL2v used to assign folding intermediates. Lane 6: analysis of a pools with CEA-IL2v LC, HC and HC-IL2 (pAB2) in Fer1L4 locus. Lane 7: analysis of a pools with CEA-IL2v LC and HC-IL2 in Fer1L4 locus and empty vector (pCM46) in NL1. Lanes 8 and 9: CEA-IL2v LC and HC-IL2 in Fer1L4 locus and CEA-IL2v HC (pAR2) in NL1 locus. B: Histogram summarizing densitometry of bands hypothesized to represent light chain (LC), light chain dimer (2LC), half antibody (1LC, 1HC-IL2) and part assembled Cergutuzumab amunaleukin (2LC, 2HC-IL2 and 2LC, 2HC).

[0030] FIG. 14 is a schematic of the Entanercept, Ancillary or destabilized GFP (dsGFP with miR target sequence in 3′UTR) gene vectors targeted to either Fer1L4 (FIG. 2, Landing Pad A), NL1 (FIG. 2, Landing Pad B) or both. Vectors were as follows: pTC1 (FIGS. 14A, B and C: Entanercept expression vector targeting Fer1L4 loci), pCM22 (FIG. 14A: Empty vector targeting NL1), pCM39 (FIG. 14B: Mus musculus SCD1 (mSCD1) expression vector targeting NL1), pCM40 (FIG. 14B: Mus musculus SCD1 codon optimized for Cricetulus griseus (ccmSCD1) expression vector targeting NL1), pCM41 (FIG. 14B: Homo sapiens SCD1 (hSCD1), pCM42 (FIG. 14B: Cricetulus griseus SREBF1 (ccSREBF1) expression vector targeting NL1), pCM43 (FIG. 14C: dsGFP_6n CPEB2A expression vector targeting NL1), pCM44 (FIG. 14C: dsGFP_6n CPEB2B expression vector targeting NL1) and pCM45 (FIG. 14C: dsGFP_6n SRPα expression vector targeting NL1). See Table 11 and Table 12 for details of ancillary genes and sponge sequences.

[0031] FIG. 15 Summarizes growth and productivity measurements from 8-day culture of RMCE pools expressing Entanercept with or without ancillary gene expression (See FIG. 14). Data are mean (n=2)±Standard deviation. A: Cell specific production rate (qP). B: Integral of viable cell concentration (IVCC). C: Secreted Entanercept concentration.

### DETAILED DESCRIPTION OF THE INVENTION

[0032] The use of the word “a” or “an” when used in conjunction with the term “comprising” in the claims and/or the specification may mean “one,” but it is also consistent with the meaning of “one or more,” “at least one,” and “one or more than one.”

[0033] Throughout this application, the term “about” is used to indicate that a value includes the inherent variation of error for the method/device being employed to determine the value, or the variation that exists among the study subjects. Typically the term is meant to encompass approximately or less than 1%, 2%, 3%, 4%, 5%, 6%, 7%, 8%, 9%, 10%, 11%, 12%, 13%, 14%, 15%, 16%, 17%, 18%, 19% or 20% variability depending on the situation.

[0034] The use of the term “or” in the claims is used to mean “and/or” unless explicitly indicated to refer only to alternatives or the alternatives are mutually exclusive, although the disclosure supports a definition that refers to only alternatives and “and/or.”

[0035] As used in this specification and claim(s), the words “comprising” (and any form of comprising, such as “comprise” and “comprises”), “having” (and any form of having, such as “have” and “has”), “including” (and any form of including, such as “includes” and “include”) or “containing” (and any form of containing, such as “contains” and “contain”) are inclusive or open-ended and do not exclude additional, un-recited, elements or method steps. It is contemplated that any embodiment discussed in this specification can be implemented with respect to any method, system, host cells, expression vectors, and/or composition of the invention. Furthermore, compositions, systems, cells, and/or vectors of the invention can be used to achieve any of the methods as described herein.

[0036] The use of the term “for example” and its corresponding abbreviation “e.g.” (whether italicized or not) means that the specific terms recited are representative examples and embodiments of the disclosure that are not intended to be limited to the specific examples referenced or cited unless explicitly stated otherwise.

[0037] In some embodiments, the present disclosure provides a mammalian cell comprising at least two distinct RTS wherein the RTS are chromosomally-integrated within the NL1 locus or the NL2 locus.

[0038] As referred to herein, the term “mammalian cell” includes cells from any member of the order Mammalia, such as, for example, human cells, mouse cells, rat cells, monkey cells, hamster cells, and the like. In some embodiments, the mammalian cell is a mouse cell, a human cell, a Chinese hamster ovary (CHO) cell, a CHO-K1 cell, a CHO-DXB11 cell, a CHO-DG44 cell, a CHOK1SV™ cell including all variants (e.g. CHOK1SV™ POTELLIGENT®, Lonza, Slough, UK), a CHOK1SV GS-KO™ (glutamine synthetase knockout) cell including all variants, a HEK293 cell including adherent and suspension-adapted variants, a HeLa cell, or a HT1080 cell.

[0039] A “nucleic acid,” “nucleic acid molecule,” or “oligonucleotide” means a polymeric compound comprising covalently linked nucleotides. The term “nucleic acid” includes polyribonucleic acid (RNA) and polydeoxyribonucleic acid (DNA), both of which may be single- or double-stranded. DNA includes, but is not limited to, complimentary DNA (cDNA), genomic DNA, plasmid or vector DNA, and synthetic DNA. RNA includes, but is not limited to, mRNA, tRNA, rRNA, snRNA, microRNA, miRNA, or MIRNA.

[0040] An “amino acid” as used herein refers to a compound containing both a carboxyl (—COOH) and amino (—NH₂) group. “Amino acid” refers to both natural and unnatural, i.e., synthetic, amino acids. Natural amino acids, with their three-letter and single letter abbreviations, include alanine (Ala; A); arginine (Arg, R); asparagine (Asn; N); aspartic acid (Asp; D); cysteine (Cys; C); glutamine (Gln; Q); glutamic acid (Glu; E); glycine (Gly; G); histidine (His; H); isoleucine (Ile; I); leucine (Leu; L); lysine (Lys; K); methionine (Met; M); phenylalanine (Phe; F); proline (Pro; P); serine (Ser; S); threonine (Thr; T); tryptophan (Trp; W); tyrosine (Tyr; Y); and valine (Val; V).

[0041] The terms “peptide,” “polypeptide,” and “protein” are used interchangeably herein, and refer to a polymeric form of amino acids of any length, which can include coded and non-coded amino acids, chemically or biochemically modified or derivatized amino acids, and polypeptides having modified peptide backbones. The term “chain” and polypeptide “chain” are used interchangeably herein and refer to a polymeric form of amino acids of a single peptide backbone.

[0042] The term “recombinant” when used in reference to a nucleic acid molecule, peptide, polypeptide, or protein means of, or resulting from, a new combination of genetic material that is not known to exist in nature. A recombinant molecule can be produced by any of the well-known techniques available in the field of recombinant technology, including, but not limited to, polymerase chain reaction (PCR), gene cutting (e.g., using restriction endonucleases), and solid state synthesis of nucleic acid molecules, peptides, or proteins. In some embodiments, “recombinant” refers to a viral vector or virus that is not known to exist in nature, e.g. a viral vector or virus that has one or more mutations, nucleic acid insertions, or heterologous genes in the viral vector or virus. In some embodiments, “recombinant” refers to a cell or host cell that is not known to exist in nature, e.g. a cell or host cell that has one or more mutations, nucleic acid insertions, or heterologous genes in the cell or host cell.

[0043] An “isolated” polypeptide, protein, peptide, or nucleic acid is a molecule that has been removed from its natural environment. It is also to be understood that “isolated” polypeptides, proteins, peptides, or nucleic acids may be formulated with excipients such as diluents or adjuvants and still be considered isolated.

[0044] The terms “sequence identity” or “% identity” in the context of nucleic acid sequences or amino acid sequences refers to the percentage of residues in the compared sequences that are the same when the sequences are aligned over a specified comparison window. A comparison window can be a segment of at least 10 to over 1000 residues in which the sequences can be aligned and compared. Methods of alignment for determination of sequence identity are well-known in the art can be performed using publicly available databases such as BLAST (blast.ncbi.nlm.nih.gov/Blast.cgi.).

[0045] In some embodiments, polypeptides or nucleic acid molecules have at least about 70%, at least about 75%, at least about 80%, at least about 85%, at least about 90%, at least about 95%, at least about 97%, at least about 98%, at least about 99% or about 100% sequence identity with a reference polypeptide or nucleic acid molecule, respectively (or a fragment of the reference polypeptide or nucleic acid molecule). In certain embodiments of the disclosure, polypeptides or nucleic acid molecules have at least 70%, at least 75%, at least 80%, at least 85%, at least 90%, at least 95%, at least 97%, at least 98%, or at least 99% or 100% sequence identity with a reference polypeptide or nucleic acid molecule, respectively (or a fragment of the reference polypeptide or nucleic acid molecule). In some embodiments, polypeptides or nucleic acid molecules have about 90%, 91%, 92%, 93%, 94%, 95%, 96%, 97%, 98%, 99%, 99.5% sequence identity with a reference polypeptide or nucleic acid molecule, respectively.

[0046] A “gene” refers to an assembly of nucleotides that encode a polypeptide, and includes cDNA and genomic DNA nucleic acid molecules. “Gene” also refers to a nucleic acid fragment that can act as a regulatory sequence preceding (5′ non-coding sequences) and following (3′ non-coding sequences) the coding sequence. In some embodiments, genes are integrated in the host cell genome with multiple copies. In some embodiments, genes are integrated in the host cell genome at predefined copy numbers.

[0047] As referred to herein, the term “regulatory element” refers to a genetic element which controls some aspect of the expression of nucleic acid sequences. As used herein, “promoter,” “promoter sequence,” or “promoter region” refers to a DNA regulatory region/sequence capable of binding RNA polymerase and involved in initiating transcription of a downstream coding or non-coding sequence. In some examples of the present disclosure, the promoter sequence includes the transcription initiation site and extends upstream to include the minimum number of bases or elements necessary to initiate transcription at levels detectable above background. In some embodiments, the promoter sequence includes a transcription initiation site, as well as protein binding domains responsible for the binding of RNA polymerase. Eukaryotic promoters will often, but not always, contain “TATA” boxes and “CAT” boxes. Various promoters, including inducible promoters, may be used to drive the gene expression, e.g., in the host cell or vectors of the present disclosure. In some embodiments, the promoter is not a leaky promoter, i.e., the promoter is not constitutively expressing any one of the gene products as described herein.

[0048] As used herein, the term “heterologous promoter” refers to such a regulatory element which is derived from a different species than the gene to which it is operably linked. In some embodiments, the heterologous promoter is derived from a prokaryotic system. In some embodiments, the heterologous promoter is derived from a eukaryotic system. In some embodiments, the disclosure provides for a cell in which one or more heterologous promoters are chromosomally-integrated into the host cell genome.

[0049] As referred to herein, the terms “in operable combination,” “in operable order,” and “operably linked” refer to the linkage of nucleic acid sequences in such a manner that a nucleic acid molecule capable of directing the transcription of a given gene and/or the synthesis of a desired protein molecule is produced. The term also refers to the linkage of amino acid sequences in such a manner so that a functional protein is produced. In some embodiments, a gene of interest is operably linked to a promoter, wherein the gene of interest is chromosomally-integrated into the host cell. In some embodiments, the gene of interest is operably linked to a heterologous promoter; where in the gene of interest is chromosomally-integrated into the host cell. In some embodiments, an ancillary gene is operably linked to a promoter, wherein the ancillary gene is chromosomally-integrated into the host cell genome. In some embodiments, the ancillary gene is operably linked to a heterologous promoter; where in the ancillary gene is chromosomally-integrated into the host cell genome. In some embodiments, a gene encoding a DtE protein is operably linked to a promoter, wherein the gene encoding a DtE protein is chromosomally-integrated into the host cell genome. In some embodiments, the gene encoding a DtE protein is operably linked to a heterologous promoter, where in the gene encoding a DtE protein is chromosomally-integrated into the host cell genome. In some embodiments, a recombinase gene is operably linked to a promoter, wherein the recombinase gene is chromosomally-integrated into the host cell. In some embodiments, the recombinase gene is operably linked to a promoter, where in the recombinase gene is not integrated into the host cell genome. In some embodiments, a recombinase gene is operably linked to a heterologous promoter, wherein the recombinase gene is not chromosomally-integrated into the host cell genome. In some embodiments, the recombinase gene is operably linked to a heterologous promoter, wherein the recombinase gene is not chromosomally-integrated into the host cell genome.

[0050] In some embodiments, regulatory elements operably link gene expression to the presence of an exogenously supplied ligand. In some embodiments, a gene of interest is operably linked to a promoter, wherein the promoter operably links gene expression to the presence of an exogenously supplied ligand and wherein the gene of interest is chromosomally-integrated into the host cell genome. In some embodiments, an ancillary gene is operably linked to a promoter, wherein the promoter operably links gene expression to the presence of an exogenously supplied ligand and wherein the ancillary gene is chromosomally-integrated into the host cell. In some embodiments, a gene encoding a DtE protein is operably linked to a promoter, wherein the promoter operably links gene expression to the presence of an exogenously supplied ligand and wherein the gene encoding a DtE protein is chromosomally-integrated into the host cell genome. In some embodiments, a recombinase gene is operably linked to a promoter, wherein the promoter operably links gene expression to the presence of an exogenously supplied ligand and wherein the recombinase gene is chromosomally-integrated into the host cell genome. In some embodiments, a recombinase gene is operably linked to a promoter, wherein the promoter operably links gene expression to the presence of an exogenously supplied ligand and wherein the recombinase gene is not chromosomally-integrated into the host cell genome.

[0051] As referred to herein, the term “chromosomally-integrated” or “chromosomal integration” refers to the stable incorporation of a nucleic acid sequence into the chromosome of a host cell, e.g. a mammalian cell. i.e., a nucleic acid sequence that is chromosomally-integrated into the genomic DNA (gDNA) of a host cell, e.g. a mammalian cell. In some embodiments, a nucleic acid sequence that is chromosomally-integrated is stable. In some embodiments, a nucleic acid sequence that is chromosomally-integrated is not located on a plasmid or a vector. In some embodiments, a nucleic acid sequence that is chromosomally-integrated is not excised. In some embodiments, chromosomal integration is mediated by the clustered regularly interspaced short palindromic repeats (CRISPR) and CRISPR associated protein (Cas) gene editing system (CRISPR/CAS).

[0052] As referred to herein, the term “chromosomal locus” refers to defined location of nucleic acids on the chromosome of the cell that may comprise at least one gene. In some embodiments, the chromosomal locus comprises about 500 base pairs to about 100,000 base pairs, about 5,000 base pairs to about 75,000 base pairs, about 5,000 base pairs to about 60,000 base pairs, about 20,000 base pairs to about 50,000 base pairs, about 30,000 base pairs to about 50,000 base pairs, or about 45,000 base pairs to about 49,000 base pairs. In some embodiments, the chromosomal locus extends up to about 100 base pairs, about 250 base pairs, about 500 base pairs, about 750 base pairs, or about 1000 base pairs to the 5′ or the 3′ end of the defined nucleic acid sequence. In some embodiments, the chromosomal locus comprises an endogenous nucleic acid sequence. In some embodiments, the chromosomal locus comprises an exogenous nucleotide sequence having been integrated into the chromosome using methods known to one of the art of molecular biology. In some embodiments, the chromosomal locus comprises a nucleotide sequence in the genome of a host cell which provides for a strong and stable production of a heterologous protein encoded by a gene of interest integrated within the chromosomal locus. In some embodiments, the chromosomal locus comprises a nucleotide sequence in the genome of a host cell which provides for a strong and stable viral gene expression. In some embodiments, the chromosomal locus comprises a nucleotide sequence in the genome of a host cell which provides efficient site-specific integration. In some embodiments, the chromosomal locus comprises the NL1 locus, the NL2 locus, the NL3 locus, the NL4 locus, the NL5 locus, or the NL6 locus as described in Table 1. In some embodiments, the disclosure is directed to a mammalian cell comprising at least two distinct RTS wherein two RTS are chromosomally-integrated within the NL1 locus, the NL2 locus, the NL3 locus, the NL4 locus, the NL5 locus, or the NL6 locus as described in Table 1. In some embodiments, the disclosure is directed to a mammalian cell comprising at least two distinct RTS wherein two RTS are chromosomally-integrated within the NL1 locus or the NL2 locus as described in Table 1.

TABLE 1

| | | | | Loci Location in Cricetulus griseus | | | | | |
|---|---|---|---|---|---|---|---|---|---|
| | | | | NCBI Reference | | | Loci Location in Homo sapien | | |
| | Loci Gene Annotation | | | Sequence⁽¹⁾ | | Landing | | | Landing |
| New | | Within | | (Cricetulus griseus) | Vector | Pad | Chromo- | Vector | Pad |
| Loci | 5′gene | gene | 3′ gene | Sequence Number | Location | Location | some | Location) | Location |
| Fer1 | Ergic3 | Fer1L4 | Spag4 | gi\|351517716\| | N/A | 24894- | Chr 20 | 33613757- | 33630003- |
| | | | | ref\|NW_003613833\| | | 26755 | | 33614117 | 33629572 |
| | | | | Scaffold 1492 | | | | | |
| | | | | SEQ ID NO: 31 | | | | | |
| NL1 | Col5a2 | No | Col5a2 | gi\|351515650\| | 143287 | 133598 | Chr 2 | 189725696- | 189725180- |
| | (pseudo) | annotated | | ref\|NW_003615899.1\| | | | | 189726735 | 189727852 |
| | | gene | | Scaffold 2552 | | | | | |
| | | | | SEQ ID NO: 32 | | | | | |
| NL2 | LOC103 | Naa15 | Rab33b | gi\|351517715\| | 1303708 to | 1313999 | Chr 4 | 140474660- | 140483934- |
| | 162114 | (Intron | | ref\|NW_003613834.1\| | 1308873 | | | 140474867 | 140483457 |
| | | between | | Scaffold2422 | | | | | |
| | | Exon | | SEQ ID NO: 33 | | | | | |
| | | 5 & 6) | | | | | | | |
| NL3 | CJO004127.1 | No | Mthfd2 | gi\|351516540\| | 279558 | N/A | Chr 2 | 74277198- | N/A |
| | | annotated | | ref\|NW_003615009.1\| | | | | 74297932 | |
| | | gene | | Scaffold3924 | | | | | |
| | | | | SEQ ID NO: 34 | | | | | |
| NL4 | MORF4L1 | No | No | gi\|351516248\| | 173850 | N/A | Chr 15 | 76952458 | N/A |
| | | annotated | anno- | ref\|NW_003615301.1\| | | | | | |
| | | gene | tated | Scaffold502 | | | | | |
| | | | gene | SEQ ID NO: 35 | | | | | |
| NL5 | ZNHIT1 | No | Tatc1 | gi\|351517397\| | 779010 | N/A | Chr 7 | 100648176- | N/A |
| | | annotated | | ref\|NW_003614152.1\| | | | | 100653983 | |
| | | gene | | Scaffold3667 | | | | | |
| | | | | SEQ ID NO: 36 | | | | | |
| NL6 | Arhgef28 | Utp15 | Ankra | gi\|351516957\| | 225021 | N/A | Chr 5 | 73084488- | N/A |
| | | | | ref\|NW_003614592.1\| | | | | 73084783 | |
| | | | | Scaffold7019 | | | | | |
| | | | | SEQ ID NO: 37 | | | | | |

[0053] One of skill in the art will recognize that the term “integrated within the NL1 locus” or “integrated within the NL2 locus” will include integration into any part of the locus, and it not limited to just the indicated genomic coordinates. One of skill in the art will recognize that the term “integrated within the NL1 locus” or “integrated within the NL2 locus” would also include corresponding loci in corresponding organisms. Thus, in some embodiments, the term “integrated within the NL1 locus” or “integrated within the NL2 locus” will include integration within about 50,000 bp, within about 40,000 bp, within about 30,000 bp, within 20,000 bp or within 10,000 bp of the indicated genomic coordinates.

[0054] In some embodiments, the disclosure is directed to a mammalian cell comprising at least two distinct RTS wherein two RTS are chromosomally-integrated into a chromosomal locus selected from Fer1L4 (see e.g. U.S. patent application Ser. No. 14/409,283), ROSA26, HGPRT, DHFR, COSMC, LDHA, or MGAT1. In some embodiments, the chromosomal locus comprises the first intron of MID1 on the X chromosome. In some embodiments, the chromosomal locus comprises an enhanced expression and stability region (EESYRs see, e.g. U.S. Pat. No. 7,771,997). In some embodiments, at least a portion of a gene in the native chromosomal locus is deleted.

[0055] A “vector” or “expression vector” is a replicon, such as a plasmid, phage, virus, or cosmid, to which another DNA segment may be attached to bring about the replication and/or expression of the attached DNA segment in a cell. “Vector” includes episomal (e.g., plasmids) and non episomal vectors. In some embodiments of the present disclosure the vector is an episomal vector, which is removed/lost from a population of cells after a number of cellular generations, e.g., by asymmetric partitioning. The term “vector” includes both viral and non-viral means for introducing a nucleic acid molecule into a cell in vitro, in vivo, or ex vivo. The term vector may include synthetic vectors. Vectors may be introduced into the desired host cells by well-known methods, including, but not limited to, transfection, transduction, cell fusion, and lipofection. Vectors can comprise various regulatory elements including promoters.

[0056] As used herein, the term “exchangeable cassette” or “cassette” is a type of mobile genetic element that contains a gene and a recombination site. In some embodiments, the exchangeable cassette comprises at least two RTS. In some embodiments, the exchangeable cassette comprises a reporter gene or a selection gene. In some embodiments, a cassette is exchanged through recombinase-mediated cassette-exchange (RMCE).

[0057] In some embodiments, site-specific integration is used to introduce one or more genes into a host cell chromosome. See, e.g., Bode et al., Biol. Chem. 381:801-813 (2000), Kolb, Cloning and Stem Cells 4:381-392 (2002) and Coates et al., Trends in Biotech. 23:407-419 (2005), each of which is incorporated by reference. In some embodiments, “site-specific integration” refers to integration of a nucleic acid sequence into a chromosome at a specific site. In some embodiments, site-specific integration can also mean “site-specific recombination.” In some embodiments, “site-specific recombination” refers to the rearrangement of two DNA partner molecules by specific enzymes performing recombination at their cognate pairs of sequences or target sites. Site-specific recombination, in contrast to homologous recombination, requires no DNA homology between partner DNA molecules, is RecA-independent, and does not involve DNA replication at any stage. In some embodiments, site-specific recombination uses a site-specific recombinase system to achieve site-specific integration of nucleic acids in host cells, e.g. mammalian cells. A recombinase system typically consists of three elements: two specific DNA sequences (recombination target sites) and a specific enzyme (recombinase). The recombinase catalyzes a recombination reaction between the specific recombination sites.

[0058] A recombinase enzyme, or recombinase, is an enzyme that catalyzes recombination in site-specific recombination. In some embodiments of the disclosure, the recombinase used for site-specific recombination is derived from a non-mammalian system. In some embodiments, the recombinase is derived from bacteria, bacteriophage, or yeast.

[0059] In some embodiments, a nucleic acid sequence encoding a recombinase is integrated into the host cell, e.g. mammalian cell. In some embodiments, a nucleic acid sequence encoding a recombinase is delivered to the host cell by methods known to molecular biology. In some embodiments, a recombinase polypeptide sequence can be delivered to the cell directly. In some embodiments, the recombinase is a Cre recombinase, a FLP recombinase, a Dre recombinase, a KD recombinase, a B2B3 recombinase, a Hin recombinase, a Tre recombinase, a λ integrase, a HK022 integrase, a HP1 integrase, a γδ resolvase/invertase, a ParA resolvase/invertase, a Tn3 resolvase/invertase, a Gin resolvase/invertase, a φC31 integrase, a BxB1 integrase, a R4 integrase or another functional recombinase enzyme. See, e.g., Thorpe & Smith, Proc. Nat'l. Acad. Sci. USA 95: 5505-5510 (1998); Kuhstoss & Rao, J. Mol. Biol. 222: 897-890 (1991); U.S. Pat. No. 5,190,871; Ow & Ausubel, J. Bacteriol. 155: 704-713 (1983); Matsuura et al., J. Bacteriol. 178: 3374-3376 (1996); Sato et al., J. Bacteriol. 172: 1092-1098 (1990); Stragier et al., Science 243: 507-512 (1989); Carrasco et al., Genes Dev. 8: 74-83 (1994); Bannam et al., Mol. Microbiol. 16: 535-551 (1995); Crelin & Rood, J. Bacteriol. 179: 5148-5156 (1997).

[0060] In some embodiments, a recombinase as described herein is a FLP recombinase. A FLP recombinase is a protein which catalyzes a site-specific recombination reaction that is involved in amplifying the copy number of the 2 plasmid of Saccharomyces cerevisiae during DNA replication. In some embodiments, the FLP recombinase of the present disclosure is derived from species of the genus Saccharomyces. In some embodiments, the FLP recombinase is derived from Saccharomyces cerevisiae. In some embodiments, the FPL recombinase is derived from a strain of Saccharomyces cerevisiae. In some embodiments, the FLP recombinase is a thermostable, mutant FLP recombinase. In some embodiments, the FLP recombinase is FLP1 or FLPe. In some embodiments, the nucleic acid sequence encoding the FLP recombinase comprises human optimized codons.

[0061] In some embodiments, the recombinase is a Cre recombinase. Cre (causes recombination) is a member of the Int family of recombinases (Argos et al. (1986) EMBO J. 5:433) and has been shown to perform efficient recombination of lox sites (locus of X-ing over) not only in bacteria but also in eukaryotic cells (Sauer (1987)Mol. Cell. Biol. 7:2087; Sauer and Henderson (1988) Proc. Natl Acad. Sci. 85:5166). In some embodiments, the Cre recombinase as described and used herein is derived from bacteriophage. In some embodiments, the Cre recombinase is derived from P1 bacteriophage.

[0062] As referred to herein, the terms “site-specific integration site,” “recombination target site,” “RTS,” and “site-specific recombinase target site” refer to a short, e.g. less than about 60 base pairs, nucleic acid site or sequence which is recognized by a site-specific recombinase and which become the crossover regions during the site-specific recombination event. In some embodiments, the recombination target site is less than about 60 base pairs, less than about 55 base pairs, less than about 50 base pairs, less than about 45 base pairs, less than about 40 base pairs, less than about 35 base pairs, or less than about 30 base pairs. In some embodiments, the recombination target site is about 30 to about 60 base pairs, about 30 to about 55 base pairs, about 32 to about 52 base pairs, about 34 to about 44 base pairs, about 32 base pairs, about 34 base pairs, or about 52 base pairs. Examples of site-specific recombinase target sites include, but are not limited to, lox sites, rox sites, frt sites, att sites and dif sites. In some embodiments, recombination target sites are nucleic acids having substantially the same sequence as set forth in SEQ ID NOs.: 1-30.

[0063] In some embodiments, the RTS is a lox site selected from Table 2. As referred to herein, the term “lox site” refers to a nucleotide sequence at which a Cre recombinase can catalyze a site-specific recombination. A variety of non-identical lox sites are known to the art. The sequences of the various lox sites are similar in that they all contain identical 13-base pair inverted repeats flanking an 8-base pair asymmetric core region in which the recombination occurs. It is the asymmetric core region that is responsible for the directionality of the site and for the variation among the different lox sites. Illustrative (non-limiting) examples of these include the naturally occurring loxP (the sequence found in the P1 genome), loxB, loxL and loxR (these are found in the E. coli chromosome) as well as several mutant or variant lox sites such as loxP 511, loxΔ86, loxΔ 117, loxC 2, loxP 2, loxP 3 and loxP 23. In some embodiments, a lox recombination target site is a nucleic acid having at least 90%, 91%, 92%, 93%, 94%, 95%, 96%, 97%, 98%, 99%, or 100% sequence identity to the sequences found in Table 2.

TABLE 2

| Name | Identifier | Sequence |
|---|---|---|
| lox P | SEQ ID NO.: 1 | ATAACTTCGTATAATGTATGCTATA |
| | | CGAAGTTAT |
| loxP 511 | SEQ ID NO.: 2 | ATAACTTCGTATAATGTATACTATA |
| | | CGAAGTTAT |
| loxP 2272 | SEQ ID NO.: 3 | ATAACTTCGTATAAAGTATCCTATA |
| | | CGAAGTTAT |
| loxP 5171 | SEQ ID NO.: 4 | ATAACTTCGTATAATGTGTACTATA |
| | | CGAAGTTAT |
| loxP 2272 | SEQ ID NO.: 5 | ATAACTTCGTATAGGATACTTTATA |
| (V) | | CGAAGTTAT |
| pLox2+ | SEQ ID NO.: 6 | ATAACTTCGTATAATGTATGCTATA |
| | | CGAAGTTAT |
| loxC 2 | SEQ ID NO.: 28 | ACAACTTCGTATAATGTATGCTATA |
| | | CGAAGTTAT |
| loxP 3 | SEQ ID NO.: 29 | TACCGTTCGTATAGTATAGTATATA |
| | | CGAAGTTAT |
| loxP 23 | SEQ ID NO.: 30 | TACCGTTCGTATAGTATAGTATATA |
| | | CGAACGGTA |

[0064] In some embodiments, the RTS is a lox site selected from loxΔ86, loxΔ117, loxC2, loxP 2, loxP 3 and loxP 23.

[0065] In some embodiments, the RTS is a Frt site selected from Table 3. As referred to herein, the term “Frt site” refers to a nucleotide sequence at which the product of the FLP gene of the yeast 2 μm plasmid, FLP recombinase, can catalyze a site-specific recombination. A variety of non-identical Frt sites are known to the art. The sequences of the various Frt sites are similar in that they all contain identical 13-base pair inverted repeats flanking an 8-base pair asymmetric core region in which the recombination occurs. It is the asymmetric core region that is responsible for the directionality of the site and for the variation among the different Frt sites. Illustrative (non-limiting) examples of these include the naturally occurring Frt (F), and several mutant or variant Frt sites such as Frt F1 and Frt F2. In some embodiments, the Frt recombination target site is a nucleic acid having at least 90%, 91%, 92%, 93%, 94%, 95%, 96%, 97%, 98%, 99%, or 100% sequence identity to the sequences found in Table 3.

TABLE 3

| Name | Identifier | Sequence |
|---|---|---|
| F | SEQ ID NO.: 7 | GAAGTTACTATTCCGAAGTTCCTATTCTCTA |
| | | GAAAGTATAGGAACTTC |
| F1 | SEQ ID NO.: 8 | GAAGTTACTATTCCGAAGTTCCTATTCTCTA |
| | | GATAGTATAGGAACTTC |
| F2 | SEQ ID NO.: 9 | GAAGTTACTATTCCGAAGTTCCTATTCTCTA |
| | | CTTAGTATAGGAACTTC |
| F3 | SEQ ID NO.: 10 | GAAGTTACTATTCCGAAGTTCCTATTCTTCA |
| | | AATAGTATAGGAACTTC |
| F4 | SEQ ID NO.: 11 | GAAGTTACTATTCCGAAGTTCCTATTCTCTA |
| | | GAAGGTATAGGAACTTC |
| F5 | SEQ ID NO.: 12 | GAAGTTCCTATTCCGAAGTTCCTATTCTTCA |
| | | AAAGGTATAGGAACTTC |
| F6 | SEQ ID NO.: 13 | GAAGTTCCTATTCCGAAGTTCCTATTCTTCA |
| | | AAAAGTATAGGAACTTC |
| F7 | SEQ ID NO.: 14 | GAAGTTCCTATTCCGAAGTTCCTATTCTTCA |
| | | ATAAGTATAGGAACTTC |
| F14 | SEQ ID NO.: 15 | GAAGTTCCTATTCCGAAGTTCCTATTCTATC |
| | | AGAAGTATAGGAACTTC |
| F15 | SEQ ID NO.: 16 | GAAGTTCCTATTCCGAAGTTCCTATTCTTAT |
| | | AGGAGTATAGGAACTTC |
| Ff61 | SEQ ID NO.: 17 | GAAGTTACTATTCCGAAGTTCCTATACTTTC |
| | | TGGAGAATAGGAACTTC |
| F2151 | SEQ ID NO.: 18 | GAAGTTACTATTCCGAAGTTCCTATACTCTC |
| | | CAGAGAATAGGAACTTC |
| Fw2 | SEQ ID NO.: 19 | GAAGTTACTATTCCGAAGTTCCTATACTATC |
| | | TACAGAATAGGAACTTC |
| F2161 | SEQ ID NO.: 20 | GAAGTTACTATTCCGAAGTTCCTATACTCTC |
| | | TGGAGAATAGGAACTTC |
| F2262 | SEQ ID NO.: 21 | GAAGTTACTATTCCGAAGTTCCTATACTATC |
| | | TTGAGAATAGGAACTTC |

[0066] In some embodiments, the RTS is a rox site selected from Table 4. As referred to herein, the term “rox site” refers to a nucleotide sequence at which a Dre recombinase can catalyze a site-specific recombination. A variety of non-identical rox sites are known to the art. Illustrative (non-limiting) examples of these include roxR and roxF. In some embodiments, a rox recombination target site is a nucleic acid having at least 90%, 91%, 92%, 93%, 94%, 95%, 96%, 97%, 98%, 99%, or 100% sequence identity to the sequences found in Table 4.

TABLE 4

| Name | Identifier | Sequence |
|---|---|---|
| roxF | SEQ ID NO.: 22 | TAACTTTAAATAATGCCAATTATTTAAAG |
| | | TTA |
| roxR | SEQ ID NO.: 23 | TAACTTTAAATAATTGGCATTATTTAAAG |
| | | TTA |

[0067] In some embodiments, the RTS is an att site selected from Table 5. As referred to herein, the term “att site” refers to a nucleotide sequence at which a λ integrase or φC31 integrase, can catalyze a site-specific recombination. A variety of non-identical aat sites are known to the art. Illustrative (non-limiting) examples of these include attP, attB, proB, trpC, galT, thrA, and rrnB. In some embodiments, an att recombination target site is a nucleic acid having at least 90%, 91%, 92%, 93%, 94%, 95%, 96%, 97%, 98%, 99%, or 100% sequence identity to the sequences found in Table 5.

TABLE 5

| Name | Identifier | Sequence |
|---|---|---|
| attB | SEQ ID NO.: 24_ | CATCAGGGCGGTCAGGCCGTAGATGTGGAA |
| | | AGAACGGCAGCACGGCGAGGACG |
| attP | SEQ ID NO.: 25 | ATGTGGTCCTTTAGATCCACTGACGTGGGT |
| | | CAGTGTCTCTAAAGGACTCGCG |
| attL | SEQ ID NO.: 26 | CATCAGGGCGGTCAGGCCGTAGATGTGGGT |
| | | CAGTGTCTCTAAAGGACTCGCG |
| attR | SEQ ID NO.: 27_ | ATGTGGTCCTTTAGATCCACTGACGTGGAA |
| | | GAACGGCAGCACGGCGAGGACG |

[0068] As referred to herein, the term “distinct recombination target sites” refers to non-identical or hetero-specific recombination target sites. For example, several variant Frt sites exist, but recombination can usually occur only between two identical Frt sites. In some embodiments, distinct recombination target sites refer to non-identical recombination target sites from the same recombination system (e.g. LoxP and LoxR). In some embodiments, distinct recombination target sites refer to non-identical recombination target sites from different recombination systems (e.g. LoxP and Frt). In some embodiments, distinct recombination target sites refer to a combination of recombination target sites from the same recombination system and recombination target sites from different recombination systems (e.g. LoxP, LoxR, Frt, and Frt1).

[0069] Various combinations of RTS can be used. In some embodiments, the cell comprises two RTS. In some embodiments, the cell comprises four RTS. In some embodiments, the cell comprises six RTS. In some embodiments, at least one RTS is selected from SEQ ID Nos.: 1-30. In some embodiments, the cell comprises six RTS. In some embodiments, at least one RTS is selected from SEQ ID Nos.: 1-6. In some embodiments, the cell comprises six RTS. In some embodiments, at least one RTS is selected from SEQ ID Nos.: 7-21. In some embodiments, the cell comprises six RTS. In some embodiments, at least one RTS is selected from SEQ ID Nos.: 22-23. In some embodiments, at least one RTS is selected from SEQ ID Nos.: 28-30. In some embodiments, the cell comprises six RTS. In some embodiments, at least one RTS is selected from SEQ ID Nos.: 24-27. In some embodiments, the cell comprising at least four distinct RTS includes the following RTS: LoxP 511, Frt F5, Frt, and LoxP. In some embodiments, the cell comprising at least four distinct RTS includes the following RTS: Frt F14 and Frt F15. In some embodiments, the cell comprising at least four distinct RTS includes the following RTS: LoxP 511, Frt F5, Frt, LoxP, Frt F14 and Frt F15. In some embodiments, the cell comprising at least four distinct RTS can include the following RTS: Frt 1, Frt 2, Frt 3, Frt 4. In some embodiments, the cell comprising at least four distinct RTS includes the following RTS: Frt m5, Frt wt, Frt m14, Frt m15, Frt m7 and Frt m6. In some embodiments, the cell comprising six distinct RTS can include the following RTS: Frt 1, Frt 2, Frt 3, Frt 4, Frt 5, Frt 6. In some embodiments, the cell comprising at least four distinct RTS can include the following RTS: Frt m5, Frt, Frt m14, Frt m15.

[0070] As referred to herein, the term “landing pad” refers to a nucleic acid sequence comprising a first recombination target site chromosomally-integrated into a host cell. In some embodiments, a landing site comprises two or more recombination target sites chromosomally-integrated into a host cell. In some embodiments, the cell comprises 1, 2, 3, 4, 5, 6, 7, or 8 landing pads. In some embodiments, the cell comprises 1, 2, or 3 landing pads. In some embodiments, the cell comprises 4 landing pads. In some embodiments, landing pads are integrated at up to 1, 2, 3, 4, 5, 6, 7, or 8 distinct chromosomal loci. In some embodiments, landing pads are integrated at up to 1, 2, or 3 distinct chromosomal loci. In some embodiments, landing pads are integrated at 4 distinct chromosomal loci.

[0071] In some embodiments, the disclosure describes how by expressing various proteins, e.g. DtE proteins, from various loci, it is possible to achieve the desired expression of the protein. In some embodiments, the DtE protein is expressed from the NL1 locus, e.g., on the CHO chromosome. In some embodiments, the DtE protein is expressed from the NL2 locus, e.g., on the CHO chromosome.

[0072] In some embodiments, the cell comprises two distinct RTS. In some embodiments, the two distinct RTS are chromosomally-integrated within the NL1 locus. In some embodiments, the two distinct RTS are chromosomally-integrated within the NL2 locus. In some embodiments, the cell comprises four distinct RTS. In some embodiments, the four distinct RTS are chromosomally-integrated on the same locus. In some embodiments, two distinct RTS are chromosomally-integrated within the NL1 locus or the NL2 locus, and two distinct RTS are chromosomally-integrated on a separate locus. In some embodiments, the separate locus is the Fer1L4 locus. In some embodiments, two distinct RTS are chromosomally-integrated within the NL1 locus, and two distinct RTS are chromosomally-integrated within the NL2 locus. In some embodiments, the cell comprises six distinct RTS. In some embodiments, at least four distinct RTS are chromosomally-integrated on the same locus. In some embodiments, at least two distinct RTS are chromosomally-integrated within the NL1 locus or the NL2 locus, and at least two distinct RTS are chromosomally-integrated on a separate locus. In some embodiments, the separate locus is the Fer1L4 locus. In some embodiments, at least two distinct RTS are chromosomally-integrated within the NL1 locus, and at least two distinct RTS are chromosomally-integrated within the NL2 locus. In some embodiments, at least one of the RTS is an frt site, a lox site, a rox site, or an att site. In some embodiments, at least one of the RTS is selected from among SEQ ID NOS.: 1-30.

[0073] Various cells can be used according to the present disclosure. In some embodiments, the cell is a mouse cell, a human cell, a Chinese hamster ovary (CHO) cell, a CHO-K1 cell, a CHO-DXB11 cell, a CHO-DG44 cell, a CHOK1SV™ cell including all variants (e.g. CHOK1SV™ POTELLIGENT®, Lonza, Slough, UK), a CHOK1SV GS-KO™ (glutamine synthetase knockout) cell including all variants, a HEK293 cell including adherent and suspension-adapted variants, a HeLa cell, or a HT1080 cell. In some embodiments, the mammalian cell comprises at least two distinct RTS, wherein the RTS are chromosomally-integrated within the NL1 locus, the NL2 locus or the Fer1L4 locus. In some embodiments, the mammalian cell comprises at least four distinct RTS wherein two distinct RTS are chromosomally-integrated within the NL1 locus or the NL2 locus and wherein two distinct RTS are chromosomally-integrated within a separate locus. In some embodiments, the separate locus is the Fer1L4 locus. In some embodiments, the mammalian cell comprises at least four distinct RTS, wherein two distinct RTS are chromosomally-integrated within the NL1 locus and two distinct RTs are chromosomally-integrated within the NL2 locus. In some embodiments, the mammalian cell comprises at least four distinct RTS wherein four distinct RTS are chromosomally-integrated within the NL1 locus or the NL2 locus. In some embodiments, the mammalian cell comprises at least six distinct RTS, where two distinct RTS are chromosomally-integrated within the NL1 locus, two distinct RTS are chromosomally-integrated within the NL2 locus, and two distinct RTS are chromosomally-integrated at a separate locus. In some embodiments, the separate locus is the Fer1L4 locus. In some embodiments, the mammalian cell comprises at least six distinct RTS, wherein six distinct RTS are integrated within the NL1 locus or the NL2 locus. In some embodiments, the mammalian cell comprises at least six distinct RTS, wherein four distinct RTS are integrated at the NL1 locus or the NL2 locus and wherein two distinct RTS are integrated at a separate locus. In some embodiments, the second locus is the Fer1L4 locus.

[0074] In some embodiments, the cell comprises a first gene of interest, wherein the first gene of interest is chromosomally-integrated.

[0075] As referred to herein, the term “gene of interest” or “GOI” is used to describe a heterologous gene. As referred to herein, the term “heterologous gene” or “HG” as it relates to nucleic acid sequences such as a coding sequence or a control sequence, denotes a nucleic acid sequence, e.g. a gene, that is not normally joined together, and/or are not normally associated with a particular cell. In some embodiments, a heterologous gene is a construct where the coding sequence itself is not found in nature (e.g., synthetic sequences having codons different from the native gene). Allelic variation or naturally occurring mutational events do not give rise to heterologous DNA, as used herein.

[0076] In some embodiments, the gene of interest comprises a reporter gene, a selection gene, a gene of therapeutic interest, an ancillary gene or a combination thereof.

[0077] As referred to herein, a “reporter gene” is a gene whose expression confers a phenotype upon a cell that can be easily identified and measured. In some embodiments, the reporter gene comprises a fluorescent protein gene. In some embodiments, the reporter gene comprises a selection gene.

[0078] As referred to herein, the term “selection gene” refers to the use of a gene which encodes an enzymatic activity that confers the ability to grow in medium lacking what would otherwise be an essential nutrient; in addition, a selection gene may confer resistance to an antibiotic or drug upon the cell in which the selection gene is expressed. A selection gene may be used to confer a particular phenotype upon a host cell. When a host cell must express a selection gene to grow in selective medium, the gene is said to be a positive selection gene. Selection gene can also be used to select against host cells containing a particular gene; selection genes used in this manner are referred to as negative selection genes.

[0079] As referred to herein, the terms “gene of therapeutic interest” refers to any functionally relevant nucleotide sequence. Thus, the gene of therapeutic interest of the present disclosure can comprise any desired gene that encodes a protein the expression of which is desired the preparation of a therapeutic recombinant protein. Representative (non-limiting) examples of suitable genes of therapeutic interest include monoclonal antibodies, bi-specific monoclonal antibodies, or antibody drug conjugates [include blood clotting factors, well expressed mAbs where protein expression is limited at transcription, hormones such as EPO, immune-fusion proteins (Fc fusions), tri-specific mAbs].

[0080] As referred to herein, the terms “ancillary gene” or “helper gene” are used interchangeable to refer to a first gene that aids in the expression of a second gene or that aids in the stabilization, folding, or post translational modification of the product of the second gene or that creates a cellular environment that promotes the production of the product of the second gene. In some embodiments, the second gene is a gene encoding a DtE protein. In some embodiments, the ancillary gene encodes RNA. In some embodiments, the ancillary gene encodes an mRNA, a tRNA, or a miRNA. In some embodiments, the ancillary gene encodes a transcription factor, a chaperone, a chaperonin, a synthetase, an oxidase, a reductase, a glycotransferase, a protease, a kinase, a phosphatase, an acetyl transferase, a lipase, or an alkylase.

[0081] In some embodiments, the first gene of interest comprises a reporter gene, a selection gene, a gene of therapeutic interest, an ancillary gene, or a combination thereof. In some embodiments, the gene of therapeutic interest comprises a gene encoding a well expressed therapeutic protein at a desired copy number. In some embodiments, the gene encoding a well expressed therapeutic protein is at a copy number of 2 copies, of 3 copies, of 4 copies, of 5 copies, of 6 copies, of 7 copies, of 8 copies, of 9 copies, or of 10 copies. In some embodiments, the gene of therapeutic interest comprises a gene encoding a DtE protein.

[0082] As referred to herein, the term a “difficult to express protein” refers to a protein for which production is difficult. In some embodiments, product of the DtE protein can be difficult because protein expression must be highly regulated. In some embodiments, the DtE protein is difficult to recover from the host cell. In some embodiments, the DtE protein is a protein that is prone to mis-folding. In some embodiments, the DtE protein is a protein that is prone to clipping. In some embodiments, the DtE protein is a protein that is prone to degradation. In some embodiments, the DtE protein is a protein that is prone to aggregation. In some embodiments, the DtE protein is a protein that is poorly soluble. In some embodiments, a DtE protein is a membrane bound protein. In some embodiments, the DtE protein is difficult to purify. In some embodiments, a DtE protein is cytotoxic. In some embodiments, the DtE protein comprises multiple polypeptide chains, e.g. 2, 3 or 4 polypeptide chains. In some embodiments, the multiple polypeptide chains of the DtE protein form a homo-oligomer to produce the DtE protein. In some embodiments, the multiple polypeptide chains of the DtE protein form a hetero-oligomer to produce the DtE protein. In some embodiments, the homo-oligomer or the hetero-oligomer is formed through covalent interactions, non-covalent interactions, or a combination thereof. In some embodiments, the DtE protein comprises a protein for which the expression of an ancillary gene is required to produce the DtE protein. In some embodiments, the DtE protein is a protein for which a post-translational modification is required to produce the DtE protein. In some embodiments, the DtE protein is a protein for which expression using standard techniques known to one of the art of molecular biology, results in a product protein with variable characteristics. In some embodiments, the DtE protein is a fusion protein.

[0083] For example, in some embodiments, the disclosure describes how expressing DtE proteins from NL1 and/or NL2 locus that DtE proteins can be obtained in more than 2 g/L protein production titers. In some embodiments, the expression of a DtE protein at the NL1 locus yields more than 2 g/L of the DtE protein. In some embodiments, the expression of a DtE protein at the NL2 locus yields more than 2 g/L of the DtE protein. In some embodiments, the DtE protein is a protein for which expression using standard techniques known to one of the art of molecular biology, results in a product protein titer less than 2 g/L.

[0084] In some embodiments, the DtE protein is a monoclonal antibody. In some embodiments, the DtE protein is a bi-specific monoclonal antibody. In some embodiments, the DtE protein is a tri-specific monoclonal antibody. In some embodiments, the DtE protein is an Fc-fusion protein. As referred to herein, the term “Fc-fusion protein” refers to a fusion protein wherein the Fc domain of an immunoglobulin is operably linked to a second peptide. In some embodiments, the DtE protein is an enzyme. In some embodiments, the DtE protein is a membrane receptor. In some embodiments, the DtE protein is a bi-specific T-cell engager (BITE® Micromet AG, Munich, Germany).

[0085] In some embodiments, the DtE protein is selected from the group consisting of an Fc-fusion protein, an enzyme, a membrane receptor, or a monoclonal antibody. In some embodiments, the monoclonal antibody is a bi-specific monoclonal antibody or a tri-specific monoclonal antibody.

[0086] In some embodiments, the DtE protein is encoded on one or more genes of interest. In some embodiments, the first gene of interest is located between two of the RTS.

[0087] As referred to herein, the term “located between two of the RTS” refers to a gene located between two of the RTS, i.e., with one of the RTS located 5′ of the gene and a different RTS located 3′ of the gene. In some embodiments, the RTS are located directly adjacent to the gene located between them. In some embodiments, the RTS are located at a defined distance from the gene located between them. In some embodiments, the RTS are directional sequences. In some embodiments, the RTS 5′ and 3′ of the gene located between them are directly oriented (i.e. they are oriented in the same direction). In some embodiments, the RTS 5′ and 3′ of the gene located between them are inversely oriented (i.e. they are oriented in opposite directions).

[0088] In some embodiments, the first gene of interest is located within the NL1 locus. In some embodiments, the cell comprises a second gene of interest, wherein the second gene of interest is chromosomally-integrated. In some embodiments, the second gene of interest comprises a reporter gene, a selection gene, a gene of therapeutic interest, an ancillary gene, or a combination thereof. In some embodiments, the gene of therapeutic interest comprises a gene encoding a DtE protein. In some embodiments, the DtE protein is selected from the group consisting of a Fc-fusion protein, an enzyme, a membrane receptor, a bi-specific T-cell engager (BITE®), or a monoclonal antibody. In some embodiments, the second gene of interest is located between two of the RTS. In some embodiments, the second gene of interest is located within the NL1 locus or the NL2 locus. In some embodiments, the first gene of interest is located within the NL1 locus, and the second gene of interest is located within the NL2 locus. In some embodiments, the cell comprises a third gene of interest, wherein the third gene of interest is chromosomally-integrated. In some embodiments, the third gene of interest comprises a reporter gene, a selection gene, a gene of therapeutic interest, an ancillary gene, or a combination thereof. In some embodiments, the gene of therapeutic interest comprises a gene encoding a DtE protein. In some embodiments, the third gene of interest is located between two of the RTS. In some embodiments, the third gene of interest is located within the NL1 locus or the NL2 locus. In some embodiments, the third gene of interest is located with a locus distinct from the NL1 locus and the NL2 locus. In some embodiments, the first gene of interest, the second gene of interest, and the third gene of interest are within three separate loci. In some embodiments, at least one of the first genes of interest, the second gene of interest, and the third gene of interest is within the NL1 locus, and at least one of the first gene of interest, the second gene of interest, and the third gene of interest is within the NL2 locus.

[0089] In some embodiments, the cell comprises a site-specific recombinase gene. In some embodiments, the site-specific recombinase gene is chromosomally-integrated.

[0090] In some embodiments, the present disclosure provides a mammalian cell comprising (a) at least four distinct RTS, wherein the cell comprises at least two distinct RTS are chromosomally-integrated within the NL1 locus or NL2 locus; (b) a first gene of interest is integrated between the at least two RTS of (a), wherein the first gene of interest comprises a reporter gene, a gene encoding a DtE protein, an ancillary gene or a combination thereof, and (c) a second gene of interest is integrated within a second chromosomal locus distinct from the locus of (a), wherein the second gene of interest comprises a reporter gene, a gene encoding a DtE protein, an ancillary gene or a combination thereof.

[0091] In some embodiments, the present disclosure provides a mammalian cell comprising (a) at least four distinct RTS, wherein the cell comprises at least two distinct RTS are chromosomally-integrated within the Fer1L4 locus; (b) at least two distinct RTS are chromosomally-integrated within the NL1 locus or the NL2 locus; (c) a first gene of interest is chromosomally-integrated within the Fer1L4 locus, wherein the first gene of interest comprises a reporter gene, a gene encoding a DtE protein, an ancillary gene or a combination thereof; and (d) a second gene of interest is chromosomally-integrated within the within the NL1 locus or NL2 locus of (b), wherein the second gene of interest comprises a reporter gene, a gene encoding a DtE protein, an ancillary gene or a combination thereof.

[0092] In some embodiments, the present disclosure provides a mammalian cell comprising at least six distinct RTS, wherein the cell comprises (a) at least two distinct RTS and a first gene of interest are chromosomally-integrated within the Fer1L4 locus; (b) at least two distinct RTS and a second gene of interest are chromosomally-integrated within the NL1 locus; and (c) at least two distinct RTS and a third gene of interest are chromosomally-integrated within the NL2 locus.

[0093] In some embodiments, the present disclosure provides a method for producing a recombinant protein producer cell comprising (a) providing a cell that comprises at least four distinct RTS and a gene encoding a site-specific recombinase, wherein at least two distinct RTS are chromosomally-integrated within the NL1 locus and at least two distinct RTS are chromosomally-integrated within the NL2 locus; (b) transfecting the cell of (a) with a first vector comprising an exchangeable cassette encoding a first gene of interest and a second vector comprising an exchangeable cassette encoding a second gene of interest; (c) integrating the first exchangeable cassette within the NL1 locus and the second exchangeable cassette within the NL2 locus; and (d) selecting a recombinant protein producer cell comprising the first exchangeable cassette and the second exchangeable cassette integrated into the chromosome.

[0094] “Transfection” as used herein means the introduction of an exogenous nucleic acid molecule, including a vector, into a cell. A “transfected” cell comprises an exogenous nucleic acid molecule inside the cell and a “transformed” cell is one in which the exogenous nucleic acid molecule within the cell induces a phenotypic change in the cell. The transfected nucleic acid molecule can be integrated into the host cell's genomic DNA and/or can be maintained by the cell, temporarily or for a prolonged period of time, extra-chromosomally. Host cells or organisms that express exogenous nucleic acid molecules or fragments are referred to as “recombinant,” “transformed,” or “transgenic” organisms. A number of transfection techniques are generally known in the art. See, e.g., Graham et al., Virology, 52:456 (1973); Sambrook et al., Molecular Cloning, a laboratory manual, Cold Spring Harbor Laboratories, New York (1989); Davis et al., Basic Methods in Molecular Biology, Elsevier (1986); and Chu et al., Gene 13:197 (1981). Such techniques can be used to introduce one or more exogenous DNA moieties into suitable host cells.

[0095] The term “matching” in reference to two RTS sequences refers to two sequences that have the ability to be bound by a recombinase and to affect a site-specific recombination between the two sequences. In some embodiments, an RTS of an exchangeable cassette matching an RTS of the cell refers to the RTS of the cassette having a sequence substantially identical to the RTS of the cell. In some embodiments, the exchangeable cassette contains a sequence substantially identical to one or two of the RTS chromosomally-integrated into the host cell genome.

[0096] In some embodiments, the term integrating refers to the integration, e.g. insertion, of the exchangeable cassette into the chromosome. In some embodiments, integration is mediated by a site-specific recombinase. In some embodiments, the inventors find that the use of SSI eliminates the need to clone cells from those transfected, as the cells are homogenous in their genetic composition.

[0097] In some embodiments, the term “selecting” refers to identifying cells containing a chromosomally-integrated marker. In some embodiments, selection is through the detection of the presence of a marker using methods known to those skilled in the art. In some embodiments, selection is through the detection of the absence of a marker using methods known to those skilled in the art.

[0098] In some embodiments, the first gene of interest comprises a reporter gene, a selection gene, a gene of therapeutic interest, an ancillary gene, or a combination thereof. In some embodiments, the gene of therapeutic interest comprises a gene encoding a DtE protein. In some embodiments, the DtE protein consists of a Fc-fusion protein, an enzyme, a membrane receptor, a bi-specific T-cell engager (BITE®), or a monoclonal antibody. In some embodiments, the monoclonal antibody is a bi-specific monoclonal antibody or a tri-specific monoclonal antibody. In some embodiments, the first gene of interest is located between two of the RTS. In some embodiments, the second gene of interest comprises a reporter gene, a selection gene, a gene of therapeutic interest, an ancillary gene, or a combination thereof. In some embodiments, the gene of therapeutic interest comprises a gene encoding a DtE protein. In some embodiments, the second gene of interest is located between two of the RTS.

[0099] In some embodiments, the present disclosure provides a method for producing a recombinant protein producer cell comprising (a) providing a cell that comprises at least at least four distinct RTS and a gene encoding a site-specific recombinase, wherein at least two distinct RTS are chromosomally-integrated within the Fer1L4 locus, and at least two distinct RTS are chromosomally-integrated within the NL1 locus or the NL2 locus; (b) transfecting the cell of (a) with a first vector comprising an exchangeable cassette encoding a first gene of interest and a second vector comprising an exchangeable cassette encoding a second gene of interest; (c) integrating the first exchangeable cassette within the Fer1L4 locus and the second exchangeable cassette within the NL1 locus or the NL2 locus; and (d) selecting a recombinant protein producer cell comprising the first exchangeable cassette and the second exchangeable cassette integrated into the chromosome. In some embodiments, the first gene of interest comprises a reporter gene, a selection gene, a gene of therapeutic interest, an ancillary gene, or a combination thereof. In some embodiments, the gene of therapeutic interest comprises a gene encoding a DtE protein. In some embodiments, the DtE protein consists of a Fc-fusion protein, an enzyme, a membrane receptor, a bi-specific T-cell engager (BITE®), or a monoclonal antibody. In some embodiments, the monoclonal antibody is a bi-specific monoclonal antibody or a tri-specific monoclonal antibody. In some embodiments, the first gene of interest is located between two of the RTS. In some embodiments, the second gene of interest comprises a reporter gene, a selection gene, a gene of therapeutic interest, an ancillary gene, or a combination thereof. In some embodiments, the gene of therapeutic interest comprises a gene encoding a DtE protein. In some embodiments, the second gene of interest is located between two of the RTS.

[0100] In some embodiments, the present disclosure provides a method for producing a recombinant protein producer cell comprising (a) providing a cell that comprises at least at least six distinct RTS and a gene encoding a site-specific recombinase, wherein at least two distinct RTS are chromosomally-integrated within the Fer1L4 locus, and at least two distinct RTS are chromosomally-integrated within the NL1 locus, and at least two distinct RTS are chromosomally-integrated within the NL2 locus; (b) transfecting the cell of (a) with a first vector comprising an exchangeable cassette encoding a first gene of interest, a second vector comprising an exchangeable cassette encoding a second gene of interest, and a third vector comprising an exchangeable cassette encoding a third gene of interest; (c) integrating the first exchangeable cassette within the Fer1L4 locus, the second exchangeable cassette within the NL1 locus, and the third exchangeable cassette within the NL2 locus; and (d) selecting a recombinant protein producer cell comprising the first exchangeable cassette, the second exchangeable cassette and the third exchangeable cassette integrated into the chromosome.

[0101] In some embodiments, the inventors have found that the use of SSI to prepare rP expression cells ensures the pool of rP expression cells is homogenous in its genetic makeup. In some embodiments, the inventors have found that the use of SSI to prepare rP expression cells ensures the pool of rP expression cells is homogenous in its efficiency. In some embodiments, the inventors have found that the use of SSI to prepare rP expression cells ensures the pool of producer cells is homogenous in the ratio of a first helper gene to a second helper gene. In some embodiments, the inventors have found that the use of SSI to prepare rP expression cells ensures the pool of producer cells is homogenous in the ratio of helper genes to genes of therapeutic interest. In some embodiments, the inventors have found that the use of SSI to prepare rP expression cells ensures more consistent rP product quality.

[0102] The cell lines described herein, including prokaryotic and/or eukaryotic cell lines, can be cultured using any suitable device, facility and methods described herein. Further, in embodiments, the devices, facilities and methods are suitable for culturing suspension cells or anchorage-dependent (adherent) cells and are suitable for production operations configured for production of pharmaceutical and biopharmaceutical products-such as polypeptide products, nucleic acid products (for example DNA or RNA), or mammalian or microbial cells and/or viruses such as those used in cellular and/or viral and microbiota therapies.

[0103] In some embodiments, the cells express or produce a product, such as a recombinant therapeutic or diagnostic product. As described in more detail below, examples of products produced by cells include, but are not limited to, antibody molecules (e.g., monoclonal antibodies, bispecific antibodies), antibody mimetics (polypeptide molecules that bind specifically to antigens but that are not structurally related to antibodies such as e.g. DARPins, affibodies, adnectins, or IgNARs), fusion proteins (e.g., Fc fusion proteins, chimeric cytokines), other recombinant proteins (e.g., glycosylated proteins, enzymes, hormones), viral therapeutics (e.g., anti-cancer oncolytic viruses, viral vectors for gene therapy and viral immunotherapy), cell therapeutics (e.g., pluripotent stem cells, mesenchymal stem cells and adult stem cells), vaccines or lipid-encapsulated particles (e.g., exosomes, virus-like particles), RNA (such as e.g. siRNA) or DNA (such as e.g. plasmid DNA), antibiotics or amino acids. In embodiments, the devices, facilities and methods can be used for producing biosimilars.

[0104] As mentioned, in embodiments, devices, facilities and methods allow for the production of eukaryotic cells, e.g., mammalian cells or lower eukaryotic cells such as for example yeast cells or filamentous fungi cells, or prokaryotic cells such as Gram-positive or Gram-negative cells and/or products of the eukaryotic or prokaryotic cells, e.g., proteins, peptides, antibiotics, amino acids, nucleic acids (such as DNA or RNA), synthesized by the eukaryotic cells in a large-scale manner. In some embodiments, also disclosed are the use of microbial organisms and spores thereof utilized in microbiota therapeutics. Unless stated otherwise herein, the devices, facilities, and methods can include any desired volume or production capacity including but not limited to bench-scale, pilot-scale, and full production scale capacities.

[0105] Moreover and unless stated otherwise herein, the devices, facilities, and methods can include any suitable reactor or bioreactor including but not limited to stirred tank, airlift, fiber, microfiber, hollow fiber, ceramic matrix, fluidized bed, fixed bed, and/or spouted bed bioreactors. As used herein, “reactor” or “bioreactor” can include a fermenter or fermentation unit, or any other reaction vessel and the term “reactor” is used interchangeably with “fermenter.” The term fermenter or fermentation refers to both microbial and mammalian cultures. For example, in some aspects, an example bioreactor unit can perform one or more, or all, of the following: feeding of nutrients and/or carbon sources, injection of suitable gas (e.g., oxygen), inlet and outlet flow of fermentation or cell culture medium, separation of gas and liquid phases, maintenance of temperature, maintenance of oxygen and CO2 levels, maintenance of pH level, agitation (e.g., stirring), and/or cleaning/sterilizing. Example reactor units, such as a fermentation unit, may contain multiple reactors within the unit, for example the unit can have 1, 2, 3, 4, 5, 10, 15, 20, 25, 30, 35, 40, 45, 50, 60, 70, 80, 90, or 100, or more bioreactors in each unit and/or a facility may contain multiple units having a single or multiple reactors within the facility. In various embodiments, the bioreactor can be suitable for batch, semi fed-batch, fed-batch, perfusion, and/or a continuous fermentation processes. Any suitable reactor diameter can be used. In embodiments, the bioreactor can have a volume between about 100 mL and about 50,000 L. Non-limiting examples include a volume of 100 mL, 250 mL, 500 mL, 750 mL, 1 liter, 2 liters, 3 liters, 4 liters, 5 liters, 6 liters, 7 liters, 8 liters, 9 liters, 10 liters, 15 liters, 20 liters, 25 liters, 30 liters, 40 liters, 50 liters, 60 liters, 70 liters, 80 liters, 90 liters, 100 liters, 150 liters, 200 liters, 250 liters, 300 liters, 350 liters, 400 liters, 450 liters, 500 liters, 550 liters, 600 liters, 650 liters, 700 liters, 750 liters, 800 liters, 850 liters, 900 liters, 950 liters, 1000 liters, 1500 liters, 2000 liters, 2500 liters, 3000 liters, 3500 liters, 4000 liters, 4500 liters, 5000 liters, 6000 liters, 7000 liters, 8000 liters, 9000 liters, 10,000 liters, 15,000 liters, 20,000 liters, and/or 50,000 liters. Additionally, suitable reactors can be multi-use, single-use, disposable, or non-disposable and can be formed of any suitable material including metal alloys such as stainless steel (e.g., 316L or any other suitable stainless steel) and Inconel, plastics, and/or glass.

[0106] In embodiments and unless stated otherwise herein, the devices, facilities, and methods described herein can also include any suitable unit operation and/or equipment not otherwise mentioned, such as operations and/or equipment for separation, purification, and isolation of such products. Any suitable facility and environment can be used, such as traditional stick-built facilities, modular, mobile and temporary facilities, or any other suitable construction, facility, and/or layout. For example, in some embodiments modular clean-rooms can be used. Additionally and unless otherwise stated, the devices, systems, and methods described herein can be housed and/or performed in a single location or facility or alternatively be housed and/or performed at separate or multiple locations and/or facilities.

[0107] By way of non-limiting examples and without limitation, U.S. Publication Nos. 2013/0280797; 2012/0077429; 2011/0280797; 2009/0305626; and U.S. Pat. Nos. 8,298,054; 7,629,167; and 5,656,491, which are hereby incorporated by reference in their entirety, describe example facilities, equipment, and/or systems that may be suitable.

[0108] In embodiments, the cells are eukaryotic cells, e.g., mammalian cells. The mammalian cells can be for example human or rodent or bovine cell lines or cell strains. Examples of such cells, cell lines or cell strains are e.g. mouse myeloma (e.g., NS0 or SP2/0 cell lines), Chinese hamster ovary (CHO) cell lines, HT1080, H9, HepG2, MCF7, MDBK Jurkat, NIH3T3, PC12, BHK (baby hamster kidney cell), VERO, YB2/0, Y0, C127, L cell, COS, e.g., COS1 and COS7, QC1-3, HEK-293, VERO, PER.C6, HeLa, EB1, EB2, EB3, oncolytic or hybridoma-cell lines. Preferably the mammalian cells are CHO-cell lines. In one embodiment, the cell is a CHO cell. In one embodiment, the cell is a CHO-K1 cell, a CHO-K1 SV cell, a DG44 CHO cell, a DUXB11 CHO cell, a CHOS, a CHO GS knock-out cell, a CHO FUT8 GS knock-out cell, a CHOZN, or a CHO-derived cell. The CHO GS knock-out cell (e.g., GSKO cell) is, for example, a CHOK1SV™ GS knockout cell (CHOK1SV GS-KO™). The CHO FUT8 knockout cell is, for example, the CHOK1SV™ POTELLIGENT® (Lonza Biologics, Inc.). Eukaryotic cells can also be avian cells, cell lines or cell strains, such as for example, EBX® cells, EB14, EB24, EB26, EB66, or EBvl3.

[0109] In some embodiments, the eukaryotic cells are stem cells. The stem cells can be, for example, pluripotent stem cells, including embryonic stem cells (ESCs), adult stem cells, induced pluripotent stem cells (iPSCs), tissue specific stem cells (e.g., hematopoietic stem cells) and mesenchymal stem cells (MSCs).

[0110] In one embodiment, the cell is a differentiated form of any of the cells described herein. In one embodiment, the cell is a cell derived from any primary cell in culture. In some embodiments, the cells are not derived from stem cells. For example, in some embodiments, the cells are used in immunotherapies (e.g., lymphocytes) either extracted or isolated from individual patients or from established cell banks. In some embodiments, the cells can include genetically manipulated cells (i.e. CAR-T, etc.)

[0111] In embodiments, the cell is a hepatocyte such as a human hepatocyte, animal hepatocyte, or a non-parenchymal cell. For example, the cell can be a plateable metabolism qualified human hepatocyte, a plateable induction qualified human hepatocyte, plateable Qualyst Transporter Certified™ human hepatocyte, suspension qualified human hepatocyte (including 10-donor and 20-donor pooled hepatocytes), human hepatic Kupffer cells, human hepatic stellate cells, dog hepatocytes (including single and pooled Beagle hepatocytes), mouse hepatocytes (including CD-1 and C57BI/6 hepatocytes), rat hepatocytes (including Sprague-Dawley, Wistar Han, and Wistar hepatocytes), monkey hepatocytes (including Cynomolgus or Rhesus monkey hepatocytes), cat hepatocytes (including Domestic Shorthair hepatocytes), and rabbit hepatocytes (including New Zealand White hepatocytes). Example hepatocytes are commercially available from Triangle Research Labs, LLC, 6 Davis Drive Research Triangle Park, N.C., USA 27709.

[0112] In one embodiment, the eukaryotic cell is a lower eukaryotic cell such as e.g. a yeast cell (e.g., Pichia genus (e.g. Pichia pastoris, Pichia methanolica, Pichia kluyveri, and Pichia angusta), Komagataella genus (e.g. Komagataella pastoris, Komagataella pseudopastoris or Komagataella phaffii), Saccharomyces genus (e.g. Saccharomyces cerevisiae, Saccharomyces kluyveri, Saccharomyces uvarum), Kluyveromyces genus (e.g. Kluyveromyces lactis, Kluyveromyces marxianus), the Candida genus (e.g. Candida utilis, Candida cacaoi, Candida boidinii), the Geotrichum genus (e.g. Geotrichum fermentans), Hansenula polymorpha, Yarrowia lipolytica, or Schizosaccharomyces pombe. Preferred is the species Pichia pastoris. Examples for Pichia pastoris strains are X33, GS115, KM71, KM71H; and CBS7435.

[0113] In one embodiment, the eukaryotic cell is a fungal cell (e.g. Aspergillus (such as A. niger, A. fumigatus, A. orzyae, A. nidula), Acremonium (such as A. thermophilum), Chaetomium (such as C. thermophilum), Chrysosporium (such as C. thermophile), Cordyceps (such as C. militaris), Corynascus, Ctenomyces, Fusarium (such as F. oxysporum), Glomerella (such as G. graminicola), Hypocrea (such as H. jecorina), Magnaporthe (such as M. orzyae), Myceliophthora (such as M. thermophile), Nectria (such as N. heamatococca), Neurospora (such as N. crassa), Penicillium, Sporotrichum (such as S. thermophile), Thielavia (such as T. terrestris, T. heterothallica), Trichoderma (such as T. reesei), or Verticillium (such as V. dahlia)).

[0114] In one embodiment, the eukaryotic cell is an insect cell (e.g., Sf9, MIMIC™ Sf9, Sf21, HIGH FIVE™ (BT1-TN-5B1-4), or BT1-Ea88 cells), an algae cell (e.g., of the genus Amphora, Bacillariophyceae, Dunaliella, Chlorella, Chlamydomonas, Cyanophyta (cyanobacteria), Nannochloropsis, Spirulina, or Ochromonas), or a plant cell (e.g., cells from monocotyledonous plants (e.g., maize, rice, wheat, or Setaria), or from a dicotyledonous plants (e.g., cassava, potato, soybean, tomato, tobacco, alfalfa, Physcomitrella patens or Arabidopsis).

[0115] In one embodiment, the cell is a bacterial or prokaryotic cell. In some embodiments, the prokaryotic cell is a Gram-positive cell such as Bacillus, Streptomyces Streptococcus, Staphylococcus or Lactobacillus. Bacillus that can be used is, e.g. the B. subtilis, B. amyloliquefaciens, B. licheniformis, B. natto, or B. megaterium. In embodiments, the cell is B. subtilis, such as B. subtilis 3NA and B. subtilis 168. Bacillus is obtainable from, e.g., the Bacillus Genetic Stock Center, Biological Sciences 556, 484 West 12^{th} Avenue, Columbus Ohio 43210-1214.

[0116] In one embodiment, the prokaryotic cell is a Gram-negative cell, such as Salmonella spp. or Escherichia coli, such as e.g., TG1, TG2, W3110, DH1, DHB4, DH5a, HMS 174, HMS174 (DE3), NM533, C600, HB101, JM109, MC4100, XL1-Blue and Origami, as well as those derived from E. coli B-strains, such as for example BL-21 or BL21 (DE3), all of which are commercially available. Suitable host cells are commercially available, for example, from culture collections such as the DSMZ (Deutsche Sammlung von Mikroorganismen and Zellkulturen GmbH, Braunschweig, Germany) or the American Type Culture Collection (ATCC). In some embodiments, the cells include other microbiota utilized as therapeutic agents. These include microbiota present in the human microbiome belonging to the phyla Firmicutes, Bacteroidetes, Proteobacteria, Verrumicrobia, actinobacteria, fusobacteria and cyanobacteria. Microbiota can include both aerobic, strict anaerobic or facultative anaerobic and include cells or spores. Therapeutic Microbiota can also include genetically manipulated organisms and vectors utilized in their modification. Other microbiome-related therapeutic organisms can include: archaea, fungi and virus. See, e.g., The Human Microbiome Project Consortium. Nature 486, 207-214 (14 Jun. 2012); Weinstock, Nature, 489(7415): 250-256 (2012); Lloyd-Price, Genome Medicine 8:51 (2016).

[0117] In some embodiments, the cultured cells are used to produce proteins e.g., antibodies, e.g., monoclonal antibodies, and/or recombinant proteins, for therapeutic use. In embodiments, the cultured cells produce peptides, amino acids, fatty acids or other useful biochemical intermediates or metabolites. For example, in embodiments, molecules having a molecular weight of about 4000 Daltons to greater than about 140,000 Daltons can be produced. In embodiments, these molecules can have a range of complexity and can include post-translational modifications including glycosylation.

[0118] In embodiments, the protein is, e.g., BOTOX, Myobloc, Neurobloc, Dysport (or other serotypes of botulinum neurotoxins), alglucosidase alpha, daptomycin, YH-16, choriogonadotropin alpha, filgrastim, cetrorelix, interleukin-2, aldesleukin, teceleulin, denileukin diftitox, interferon alpha-n3 (injection), interferon alpha-nl, DL-8234, interferon, Suntory (gamma-la), interferon gamma, thymosin alpha 1, tasonermin, DigiFab, ViperaTAb, EchiTAb, CroFab, nesiritide, abatacept, alefacept, Rebif, eptoterminalfa, teriparatide (osteoporosis), calcitonin injectable (bone disease), calcitonin (nasal, osteoporosis), etanercept, hemoglobin glutamer 250 (bovine), drotrecogin alpha, collagenase, carperitide, recombinant human epidermal growth factor (topical gel, wound healing), DWP401, darbepoetin alpha, epoetin omega, epoetin beta, epoetin alpha, desirudin, lepirudin, bivalirudin, nonacog alpha, Mononine, eptacog alpha (activated), recombinant Factor VIII+VWF, Recombinate, recombinant Factor VIII, Factor VIII (recombinant), Alphnmate, octocog alpha, Factor VIII, palifermin, Indikinase, tenecteplase, alteplase, pamiteplase, reteplase, nateplase, monteplase, follitropin alpha, rFSH, hpFSH, micafungin, pegfilgrastim, lenograstim, nartograstim, sermorelin, glucagon, exenatide, pramlintide, iniglucerase, galsulfase, Leucotropin, molgramostirn, triptorelin acetate, histrelin (subcutaneous implant, Hydron), deslorelin, histrelin, nafarelin, leuprolide sustained release depot (ATRIGEL), leuprolide implant (DUROS), goserelin, Eutropin, KP-102 program, somatropin, mecasermin (growth failure), enlfavirtide, Org-33408, insulin glargine, insulin glulisine, insulin (inhaled), insulin lispro, insulin deternir, insulin (buccal, RapidMist), mecasermin rinfabate, anakinra, celmoleukin, 99 mTc-apcitide injection, myelopid, Betaseron, glatiramer acetate, Gepon, sargramostim, oprelvekin, human leukocyte-derived alpha interferons, Bilive, insulin (recombinant), recombinant human insulin, insulin aspart, mecasenin, Roferon-A, interferon-alpha 2, Alfaferone, interferon alfacon-1, interferon alpha, Avonex’ recombinant human luteinizing hormone, dornase alpha, trafermin, ziconotide, taltirelin, diboterminalfa, atosiban, becaplermin, eptifibatide, Zemaira, CTC-111, Shanvac-B, HPV vaccine (quadrivalent), octreotide, lanreotide, ancestirn, agalsidase beta, agalsidase alpha, laronidase, prezatide copper acetate (topical gel), rasburicase, ranibizumab, Actimmune, PEG-Intron, Tricomin, recombinant house dust mite allergy desensitization injection, recombinant human parathyroid hormone (PTH) 1-84 (sc, osteoporosis), epoetin delta, transgenic antithrombin III, Granditropin, Vitrase, recombinant insulin, interferon-alpha (oral lozenge), GEM-21S, vapreotide, idursulfase, omnapatrilat, recombinant serum albumin, certolizumab pegol, glucarpidase, human recombinant C1 esterase inhibitor (angioedema), lanoteplase, recombinant human growth hormone, enfuvirtide (needle-free injection, Biojector 2000), VGV-1, interferon (alpha), lucinactant, aviptadil (inhaled, pulmonary disease), icatibant, ecallantide, omiganan, Aurograb, pexigananacetate, ADI-PEG-20, LDI-200, degarelix, cintredelinbesudotox, Favld, MDX-1379, ISAtx-247, liraglutide, teriparatide (osteoporosis), tifacogin, AA4500, T4N5 liposome lotion, catumaxomab, DWP413, ART-123, Chrysalin, desmoteplase, amediplase, corifollitropinalpha, TH-9507, teduglutide, Diamyd, DWP-412, growth hormone (sustained release injection), recombinant G-CSF, insulin (inhaled, AIR), insulin (inhaled, Technosphere), insulin (inhaled, AERx), RGN-303, DiaPep277, interferon beta (hepatitis C viral infection (HCV)), interferon alpha-n3 (oral), belatacept, transdermal insulin patches, AMG-531, MBP-8298, Xerecept, opebacan, AIDSVAX, GV-1001, LymphoScan, ranpirnase, Lipoxysan, lusupultide, MP52 (beta-tricalciumphosphate carrier, bone regeneration), melanoma vaccine, sipuleucel-T, CTP-37, Insegia, vitespen, human thrombin (frozen, surgical bleeding), thrombin, TransMID, alfimeprase, Puricase, terlipressin (intravenous, hepatorenal syndrome), EUR-1008M, recombinant FGF-I (injectable, vascular disease), BDM-E, rotigaptide, ETC-216, P-113, MBI-594AN, duramycin (inhaled, cystic fibrosis), SCV-07, OPI-45, Endostatin, Angiostatin, ABT-510, Bowman Birk Inhibitor Concentrate, XMP-629, 99 mTc-Hynic-Annexin V, kahalalide F, CTCE-9908, teverelix (extended release), ozarelix, rornidepsin, BAY-504798, interleukin4, PRX-321, Pepscan, iboctadekin, rhlactoferrin, TRU-015, IL-21, ATN-161, cilengitide, Albuferon, Biphasix, IRX-2, omega interferon, PCK-3145, CAP-232, pasireotide, huN901-DMI, ovarian cancer immunotherapeutic vaccine, SB-249553, Oncovax-CL, OncoVax-P, BLP-25, CerVax-16, multi-epitope peptide melanoma vaccine (MART-1, gp100, tyrosinase), nemifitide, rAAT (inhaled), rAAT (dermatological), CGRP (inhaled, asthma), pegsunercept, thymosinbeta4, plitidepsin, GTP-200, ramoplanin, GRASPA, OBI-1, AC-100, salmon calcitonin (oral, eligen), calcitonin (oral, osteoporosis), examorelin, capromorelin, Cardeva, velafermin, 131I-TM-601, KK-220, T-10, ularitide, depelestat, hematide, Chrysalin (topical), rNAPc2, recombinant Factor V111 (PEGylated liposomal), bFGF, PEGylated recombinant staphylokinase variant, V-10153, SonoLysis Prolyse, NeuroVax, CZEN-002, islet cell neogenesis therapy, rGLP-1, BIM-51077, LY-548806, exenatide (controlled release, Medisorb), AVE-0010, GA-GCB, avorelin, ACM-9604, linaclotid eacetate, CETi-1, Hemospan, VAL (injectable), fast-acting insulin (injectable, Viadel), intranasal insulin, insulin (inhaled), insulin (oral, eligen), recombinant methionyl human leptin, pitrakinra subcutancous injection, eczema), pitrakinra (inhaled dry powder, asthma), Multikine, RG-1068, MM-093, NBI-6024, AT-001, PI-0824, Org-39141, Cpn10 (autoimmune diseases/inflammation), talactoferrin (topical), rEV-131 (ophthalmic), rEV-131 (respiratory disease), oral recombinant human insulin (diabetes), RPI-78M, oprelvekin (oral), CYT-99007 CTLA4-Ig, DTY-001, valategrast, interferon alpha-n3 (topical), IRX-3, RDP-58, Tauferon, bile salt stimulated lipase, Merispase, alaline phosphatase, EP-2104R, Melanotan-II, bremelanotide, ATL-104, recombinant human microplasmin, AX-200, SEMAX, ACV-1, Xen-2174, CJC-1008, dynorphin A, SI-6603, LAB GHRH, AER-002, BGC-728, malaria vaccine (virosomes, PeviPRO), ALTU-135, parvovirus B19 vaccine, influenza vaccine (recombinant neuraminidase), malaria/HBV vaccine, anthrax vaccine, Vacc-5q, Vacc-4x, HIV vaccine (oral), HPV vaccine, Tat Toxoid, YSPSL, CHS-13340, PTH(1-34) liposomal cream (Novasome), Ostabolin-C, PTH analog (topical, psoriasis), MBRI-93.02, MTB72F vaccine (tuberculosis), MVA-Ag85A vaccine (tuberculosis), FARA04, BA-210, recombinant plague FIV vaccine, AG-702, OxSODrol, rBetV1, Der-p1/Der-p2/Der-p7 allergen-targeting vaccine (dust mite allergy), PR1 peptide antigen (leukemia), mutant ras vaccine, HPV-16 E7 lipopeptide vaccine, labyrinthin vaccine (adenocarcinoma), CML vaccine, WT1-peptide vaccine (cancer), IDD-5, CDX-110, Pentrys, Norelin, CytoFab, P-9808, VT-111, icrocaptide, telbermin (dermatological, diabetic foot ulcer), rupintrivir, reticulose, rGRF, HA, alpha-galactosidase A, ACE-011, ALTU-140, CGX-1160, angiotensin therapeutic vaccine, D-4F, ETC-642, APP-018, rhMBL, SCV-07 (oral, tuberculosis), DRF-7295, ABT-828, ErbB2-specific immunotoxin (anticancer), DT3SSIL-3, TST-10088, PRO-1762, Combotox, cholecystokinin-B/gastrin-receptor binding peptides, 111In-hEGF, AE-37, trasnizumab-DM1, Antagonist G, IL-12 (recombinant), PM-02734, IMP-321, rhIGF-BP3, BLX-883, CUV-1647 (topical), L-19 based radioimmunotherapeutics (cancer), Re-188-P-2045, AMG-386, DC/1540/KLH vaccine (cancer), VX-001, AVE-9633, AC-9301, NY-ESO-1 vaccine (peptides), NA17.A2 peptides, melanoma vaccine (pulsed antigen therapeutic), prostate cancer vaccine, CBP-501, recombinant human lactoferrin (dry eye), FX-06, AP-214, WAP-8294A (injectable), ACP-HIP, SUN-11031, peptide YY [3-36] (obesity, intranasal), FGLL, atacicept, BR3-Fc, BN-003, BA-058, human parathyroid hormone 1-34 (nasal, osteoporosis), F-18-CCR1, AT-1100 (celiac disease/diabetes), JPD-003, PTH(7-34) liposomal cream (Novasome), duramycin (ophthalmic, dry eye), CAB-2, CTCE-0214, GlycoPEGylated erythropoietin, EPO-Fc, CNTO-528, AMG-114, JR-013, Factor XIII, aminocandin, PN-951, 716155, SUN-E7001, TH-0318, BAY-73-7977, teverelix (immediate release), EP-51216, hGH (controlled release, Biosphere), OGP-I, sifuvirtide, TV4710, ALG-889, Org-41259, rhCC10, F-991, thymopentin (pulmonary diseases), r(m)CRP, hepatoselective insulin, subalin, L19-IL-2 fusion protein, elafin, NMK-150, ALTU-139, EN-122004, rhTPO, thrombopoietin receptor agonist (thrombocytopenic disorders), AL-108, AL-208, nerve growth factor antagonists (pain), SLV-317, CGX-1007, INNO-105, oral teriparatide (eligen), GEM-OS1, AC-162352, PRX-302, LFn-p24 fusion vaccine (Therapore), EP-1043, S pneumoniae pediatric vaccine, malaria vaccine, Neisseria meningitidis Group B vaccine, neonatal group B streptococcal vaccine, anthrax vaccine, HCV vaccine (gpE1+gpE2+MF-59), otitis media therapy, HCV vaccine (core antigen+ISCOMATRIX), hPTH(1-34) (transdermal, ViaDerm), 768974, SYN-101, PGN-0052, aviscumnine, BIM-23190, tuberculosis vaccine, multi-epitope tyrosinase peptide, cancer vaccine, enkastim, APC-8024, GI-5005, ACC-001, TTS-CD3, vascular-targeted TNF (solid tumors), desmopressin (buccal controlled-release), onercept, and TP-9201.

[0119] In some embodiments, the polypeptide is adalimumab (HUMIRA), infliximab (REMICADE™), rituximab (RITUXAN™/MABTHERA™) etanercept (ENBREL™), bevacizumab (AVASTIN™), trastuzumab (HERCEPTIN™), pegrilgrastim (NEULASTA™), or any other suitable polypeptide including biosimilars and biobetters.

[0120] Other suitable polypeptides are those listed below in Table 6 and in Table 1 of US2016/0097074. One of skill in the art can appreciate that the disclosure of the present invention additional would encompass combinations of products and/or conjugates as described herein [(i.e. multi-proteins, modified proteins (conjugated to PEG, toxins, other active ingredients)].

TABLE 6

| Protein Product | Reference Listed Drug |
|---|---|
| interferon gamma-1b | ACTIMMUNE ® |
| alteplase; tissue plasminogen activator | ACTIVASE ®/CATHFLO ® |
| recombinant antihemophilic factor | ADVATE |
| human albumin | ALBUTEIN ® |
| Laronidase | ALDURAZYME ® |
| interferon alfa-N3, human leukocyte derived | ALFERON N ® |
| human antihemophilic factor | ALPHANATE ® |
| virus-filtered human coagulation factor IX | ALPHANINE ® SD |
| Alefacept; recombinant, dimeric fusion protein LFA3-Ig | AMEVIVE ® |
| Bivalirudin | ANGIOMAX ® |
| darbepoetin alfa | ARANESP ™ |
| Bevacizumab | AVASTIN ™ |
| interferon beta-1a; recombinant | AVONEX ® |
| coagulation factor IX | BENEFIX ™ |
| interferon beta-1b | BETASERON ® |
| Tositumomab | BEXXAR ® |
| antihemophilic factor | BIOCLATE ™ |
| human growth hormone | BIOTROPIN ™ |
| botulinum toxin type A | BOTOX ® |
| Alemtuzumab | CAMPATH ® |
| acritumomab; technetium-99 labeled | CEA-SCAN ® |
| alglucerase; modified form of beta-glucocerebrosidase | CEREDASE ® |
| imiglucerase; recombinant form of beta- | CEREZYME ® |
| glucocerebrosidase | |
| crotalidae polyvalent immune Fab, ovine | CROFAB ™ |
| Digoxin immune fab [ovine] | DIGIFAB ™ |
| Rasburicase | ELITEK ® |
| Etanercept | ENBREL ® |
| Epoietin alfa | EPOGEN ® |
| Cetuximab | ERBITUX ™ |
| Algasidase beta | FABRAZYME ® |
| Urofollitropin | FERINEX ™ |
| Follitropin beta | FOLLISTIM ™ |
| Teriparatide | FORTEO ® |
| Human somatropin | GENOTROPIN ® |
| Glucagon | GLUCAGEN ® |
| Follitropin alfa | GONAL-F ® |
| Antihemophillic factor | HELIXATE ® |
| Antihemophilic factor; Factor XIII | HEMOFIL |
| Adefovir dipivoxil | HEPSERA ™ |
| trastuzumab | HERCEPTIN ® |
| Insulin | HUMALOG ® |
| Antihemophilic factor/von Willebrand factor complex- | HUMATE-P ® |
| human | |
| Somatotropin | HUMATROPE ® |
| Adalimumab | HUMIRA ™ |
| Human insulin | HUMULIN ® |
| Recombinant human hyaluronidase | HYLENEX ™ |
| Interferon alfacon-1 | INFERGEN ® |
| Eptifibatide | INTEGRILLIN ™ |
| Alpha-interferon | INTRON A ® |
| Palifermin | KEPIVANCE |
| Anakinra | KINERET ™ |
| Antihemophilic factor | KOGENATE ®FS |
| Insulin glargine | LANTUS ® |
| Granulocyte macrophage colony-simulating factor | LEUKINE ®/LEUKINE ®LIQUID |
| Lutropin alfa for injection | LUVERIS |
| OspA lipoprotein | LYMERIX ™ |
| Ranibizumab | LUCENTIS ® |
| Gemtuzumab ozogamicin | MYLOTARG ™ |
| Galsulfase | NAGLAZYME ™ |
| Nesiritide | NATRECOR ® |
| Pegfilgrastim | NEULASTA ™ |
| Oprelvekin | NEUMEGA ® |
| Filgrastim | NEUPOGEN ® |
| Fanolesomab | NEUTROSPEC ™ (FORMERLY |
| | LEUTECH ®) |
| Somatropin [rDNA] | NORDITROPIN ®/NORDITROPIN |
| | NORDIFLEX ® |
| Mitoxantrone | NOVANTRONE ® |
| Insulin; zinc suspension | NOVOLIN L ® |
| Insulin; isophane suspension | NO VOLIN N ® |
| Insulin, regular | NOVOLIN R ® |
| Insulin | NOVOLIN ® |
| Coagulation factor VIIa | NOVOSEVEN ® |
| Somatropin | NUTROPIN ® |
| Immunoglobulin intravenous | OCTAGAM ® |
| PEG-L-asparaginase | ONCASPAR ® |
| Abatacept, fully human soluable fusion protein | ORENCIA ™ |
| Muromomab-CD3 | ORTHOCLONE OKT3 ® |
| High-molecular weight hyaluronan | ORTHOVISC ® |
| Human chorionic gonadotropin | OVIDREL ® |
| Live attenuated Bacillus Calmette-Guerin | PACIS ® |
| Peginterferon alfa-2a | PEGASYS ® |
| Pegylated version of interferon alfa-2b | PEG-INTRON ™ |
| Abarelix (Injection suspension); gonadotropin-releasing | PLENAXIS ™ |
| hormone antagonist | |
| Epoietin alfa | PROCRIT ® |
| Aldesleukin | PROLEUKIN, IL-2 ® |
| Somatrem | PROTROPIN ® |
| Dornase alfa | PULMOZYME ® |
| Efalizumab; selective, reversible T-cell blocker | RAPTIVA ™ |
| Combination of ribavirin and alpha interferon | REBETRON ™ |
| Interferon beta 1a | REBIF ® |
| Antihemophilic factor | RECOMBINATE ® RAHF |
| Antihemophilic factor | REFACTO ® |
| Lepirudin | REFLUDAN ® |
| Infliximab | REMICADE ® |
| Abciximab | REOPRO ™ |
| Reteplase | RETAVASE ™ |
| Rituxima | RITUXAN ™ |
| Interferon alfa-2^{a} | ROFERON-A ® |
| Somatropin | SAIZEN ® |
| Synthetic porcine secretin | SECREFLO ™ |
| Basiliximab | SIMULECT ® |
| Eculizumab | SOLIRIS ® |
| Pegvisomant | SOMAVERT ® |
| Palivizumab; recombinantly produced, humanized mAb | SYNAGIS ™ |
| Thyrotropin alfa | THYROGEN ® |
| Tenecteplase | TNKASE ™ |
| Natalizumab | TYSABRI ® |
| Human immune globulin intravenous 5% and 10% | VENOGLOBULIN-S ® |
| solutions | |
| Interferon alfa-n1, lymphoblastoid | WELLFERON ® |
| Drotrecogin alfa | XIGRIS ™ |
| Omaluzumab; recombinant DNA-derived humanized | XOLAIR ® |
| monoclonal antibody targeting immunoglobulin-E | |
| Daclizumab | ZENAPAX ® |
| Ibritumomab tiuxetan | ZEVALIN ™ |
| Somatotropin | ZORBTIVE ™ (SEROSTIM ®) |

[0121] In embodiments, the polypeptide is a hormone, blood clotting/coagulation factor, cytokine/growth factor, antibody molecule, fusion protein, protein vaccine, or peptide as shown in Table 7.

TABLE 7
Exemplary Products

| Therapeutic | | |
|---|---|---|
| Product type | Product | Trade Name |
| Hormone | Erythropoietin, Epoein-α | Epogen, Procrit |
| | Darbepoetin-α | Aranesp |
| | Growth hormone (GH), | Genotropin, Humatrope, |
| | somatotropin | Norditropin, NovIVitropin, |
| | | Nutropin, Omnitrope, Protropin, |
| | | Siazen, Serostim, Valtropin |
| | Human follicle-stimulating hormone | Gonal-F, Follistim |
| | (FSH) | |
| | Human chorionic gonadotropin | Ovidrel, Luveris |
| | Lutropin-α | GlcaGen |
| | Glucagon | Geref |
| | Growth hormone releasing hormone | ChiRhoStim (human peptide), |
| | (GHRH) | SecreFlo (porcine peptide) |
| | Secretin | |
| | Thyroid stimulating hormone | Thyrogen |
| | (TSH), thyrotropin | |
| Blood Clotting/ | Factor VIIa | NovoSeven |
| Coagulation | Factor VIII | Bioclate, Helixate, Kogenate, |
| Factors | | Recombinate, ReFacto |
| | Factor IX | Benefix |
| | Antithrombin III (AT-III) | Thrombate III |
| | Protein C concentrate | Ceprotin |
| Cytokine/Growth | Type I alpha-interferon | Infergen |
| factor | Interferon-αn3 (IFNαn3) | Alferon N |
| | Interferon-β1a (rIFN- β) | Avonex, Rebif |
| | Interferon-β1b (rIFN- β) | Betaseron |
| | Interferon-γ1b (IFN γ) | Actimmune |
| | Aldesleukin (interleukin 2(IL2), | Proleukin |
| | epidermal theymocyte activating | |
| | factor; ETAF | |
| | Palifermin (keratinocyte growth | Kepivance |
| | factor; KGF) | |
| | Becaplemin (platelet-derived growth | Regranex |
| | factor; PDGF) | |
| | Anakinra (recombinant IL1 | Anril, Kineret |
| | antagonist) | |
| Antibody | Bevacizumab (VEGFA mAb) | Avastin, Erbitux |
| molecules | Cetuximab (EGFR mAb) | Vectibix |
| | Panitumumab (EGFR mAb) | Campath |
| | Alemtuzumab (CD52 mAb) | Rituxan |
| | rituximab (CD20 chimeric Ab) | Herceptin, Orencia |
| | Trastuzumab (HER2/Neu mAb) | Humira, Enbrel |
| | Abatacept (CTLA Ab/Fc fusion) | Remicade |
| | Adalimumab (TNFα mAb) | Amevive |
| | Etanercept (TNF receptor/Fc fusion) | Raptiva, Tysabri |
| | Infliximab (TNFα chimeric mAb) | Soliris, Orthoclone, OKT3 |
| | Alefacept (CD2 fusion protein) | |
| | Efalizumab (CD11a mAb) | |
| | Natalizumab (integrin α4 subunit | |
| | mAb) | |
| | Eculizumab (C5mAb) | |
| | Muromonab-CD3 | |
| Other: | Insulin | Humulin, Novolin |
| | Hepatitis B surface antigen | Engerix, Recombivax HB |
| | (HBsAg) | Gardasil |
| Fusion | HPV vaccine | LYMErix |
| proteins/Protein | OspA | Rhophylac |
| vaccines/Peptides | Anti-Rhesus(Rh) immunoglobulin G | Fuzeon |
| | Enfuvirtide | |
| | Spider silk, e.g., fibrion | QMONOS |

[0122] In embodiments, the protein is multispecific protein, e.g., a bispecific antibody as shown in Table 8.

TABLE 8
Bispecific Formats

| Name (other | | | | | |
|---|---|---|---|---|---|
| names, | | | Proposed | | Diseases (or |
| sponsoring | BsAb | | mechanisms of | Development | healthy |
| organizations) | format | Targets | action | stages | volunteers) |
| Catumaxomab | BsIgG: | CD3, EpCAM | Retargeting of T | Approved in | Malignant |
| (REMOVAB ®, | Triomab | | cells to tumor, Fc | EU | ascites in |
| Fresenius Biotech, | | | mediated effector | | EpCAM positive |
| Trion Pharma, | | | functions | | tumors |
| Neopharm) | | | | | |
| Ertumaxomab | BsIgG: | CD3, HER2 | Retargeting of T | Phase I/II | Advanced solid |
| (Neovii Biotech, | Triomab | | cells to tumor | | tumors |
| Fresenius Biotech) | | | | | |
| Blinatumomab | BiTE | CD3, CD19 | Retargeting of T | Approved in | Precursor B-cell |
| (BLINCYTO ®, | | | cells to tumor | USA | ALL |
| AMG 103, MT | | | | Phase II and | ALL |
| 103, MEDI 538, | | | | III | DLBCL |
| Amgen) | | | | Phase II | NHL |
| | | | | Phase I | |
| REGN1979 | BsAb | CD3, CD20 | | | |
| (Regeneron) | | | | | |
| Solitomab (AMG | BiTE | CD3, EpCAM | Retargeting of T | Phase I | Solid tumors |
| 110, MT110, | | | cells to tumor | | |
| Amgen) | | | | | |
| MEDI 565 (AMG | BiTE | CD3, CEA | Retargeting of T | Phase I | Gastrointestinal |
| 211, MedImmune, | | | cells to tumor | | adenocancinoma |
| Amgen) | | | | | |
| RO6958688 | BsAb | CD3, CEA | | | |
| (Roche) | | | | | |
| BAY2010112 | BiTE | CD3, PSMA | Retargeting of T | Phase I | Prostate cancer |
| (AMG 212, Bayer; | | | cells to tumor | | |
| Amgen) | | | | | |
| MGD006 | DART | CD3, CD123 | Retargeting of T | Phase I | AML |
| (Macrogenics) | | | cells to tumor | | |
| MGD007 | DART | CD3, gpA33 | Retargeting of T | Phase I | Colorectal cancer |
| (Macrogenics) | | | cells to tumor | | |
| MGD011 | DART | CD19, CD3 | | | |
| (Macrogenics) | | | | | |
| SCORPION | BsAb | CD3, CD19 | Retargeting of T | | |
| (Emergent | | | cells to tumor | | |
| Biosolutions, | | | | | |
| Trubion) | | | | | |
| AFM11 (Affimed | TandAb | CD3, CD19 | Retargeting of T | Phase I | NHL and ALL |
| Therapeutics) | | | cells to tumor | | |
| AFM12 (Affimed | TandAb | CD19, CD16 | Retargeting of | | |
| Therapeutics) | | | NK cells to tumor | | |
| | | | cells | | |
| AFM13 (Affimed | TandAb | CD30, CD16A | Retargeting of | Phase II | Hodgkin's |
| Therapeutics) | | | NK cells to tumor | | Lymphoma |
| | | | cells | | |
| GD2 (Barbara Ann | T cells | CD3, GD2 | Retargeting of T | Phase I/II | Neuroblastoma |
| Karmanos Cancer | preloaded | | cells to tumor | | and |
| Institute) | with BsAb | | | | osteosarcoma |
| pGD2 (Barbara | T cells | CD3, Her2 | Retargeting of T | Phase II | Metastatic breast |
| Ann Karmanos | preloaded | | cells to tumor | | cancer |
| Cancer Institute) | with BsAb | | | | |
| EGFRBi-armed | T cells | CD3, EGFR | Autologous | Phase I | Lung and other |
| autologous | preloaded | | activated T cells | | solid tumors |
| activated T cells | with BsAb | | to EGFR-positive | | |
| (Roger Williams | | | tumor | | |
| Medical Center) | | | | | |
| Anti-EGFR-armed | T cells | CD3, EGFR | Autologous | Phase I | Colon and |
| activated T-cells | preloaded | | activated T cells | | pancreatic |
| (Barbara Ann | with BsAb | | to EGFR-positive | | cancers |
| Karmanos Cancer | | | tumor | | |
| Institute) | | | | | |
| rM28 (University | Tandem | CD28, MAPG | Retargeting of T | Phase II | Metastatic |
| Hospital Tübingen) | scFv | | cells to tumor | | melanoma |
| IMCgp100 | ImmTAC | CD3, peptide MHC | Retargeting of T | Phase I/II | Metastatic |
| (Immunocore) | | | cells to tumor | | melanoma |
| DT2219ARL | 2 scFv | CD19, CD22 | Targeting of | Phase I | B cell leukemia |
| (NCI, University | linked to | | protein toxin to | | or lymphoma |
| of Minnesota) | diphtheria | | tumor | | |
| | toxin | | | | |
| XmAb5871 | BsAb | CD19, CD32b | | | |
| (Xencor) | | | | | |
| NI-1701 | BsAb | CD47, CD19 | | | |
| (NovImmune) | | | | | |
| MM-111 | BsAb | ErbB2, ErbB3 | | | |
| (Merrimack) | | | | | |
| MM-141 | BsAb | IGF-1R, ErbB3 | | | |
| (Merrimack) | | | | | |
| NA (Merus) | BsAb | HER2, HER3 | | | |
| NA (Merus) | BsAb | CD3, CLEC12A | | | |
| NA (Merus) | BsAb | EGFR, HER3 | | | |
| NA (Merus) | BsAb | PD1, undisclosed | | | |
| NA (Merus) | BsAb | CD3, undisclosed | | | |
| Duligotuzumab | DAF | EGFR, HER3 | Blockade of 2 | Phase I and II | Head and neck |
| (MEHD7945A, | | | receptors, ADCC | Phase II | cancer |
| Genentech, Roche) | | | | | Colorectal cancer |
| LY3164530 (Eli | Not | EGFR, MET | Blockade of 2 | Phase I | Advanced or |
| Lily) | disclosed | | receptors | | metastatic cancer |
| MM-111 | HSA body | HER2, HER3 | Blockade of 2 | Phase II | Gastric and |
| (Merrimack | | | receptors | Phase I | esophageal |
| Pharmaceuticals) | | | | | cancers |
| | | | | | Breast cancer |
| MM-141, | IgG-scFv | IGF-1R, HER3 | Blockade of 2 | Phase I | Advanced solid |
| (Merrimack | | | receptors | | tumors |
| Pharmaceuticals) | | | | | |
| RG7221 | CrossMab | Ang2, VEGFA | Blockade of 2 | Phase I | Solid tumors |
| (RO5520985, | | | proangiogenics | | |
| Roche) | | | | | |
| RG7716 (Roche) | CrossMab | Ang2, VEGFA | Blockade of 2 | Phase I | Wet AMD |
| | | | proangiogenics | | |
| OMP-305B83 | BsAb | DLL4/VEGF | | | |
| (OncoMed) | | | | | |
| TF2 | Dock and | CEA, HSG | Pretargeting | Phase II | Colorectal, |
| (Immunomedics) | lock | | tumor for PET or | | breast and lung |
| | | | radioimaging | | cancers |
| ABT-981 | DVD-Ig | IL-1α, IL-1β | Blockade of 2 | Phase II | Osteoarthritis |
| (AbbVie) | | | proinflammatory | | |
| | | | cytokines | | |
| ABT-122 | DVD-Ig | TNF, IL-17A | Blockade of 2 | Phase II | Rheumatoid |
| (AbbVie) | | | proinflammatory | | arthritis |
| | | | cytokines | | |
| COVA322 | IgG- | TNF, IL17A | Blockade of 2 | Phase I/II | Plaque psoriasis |
| | fynomer | | proinflammatory | | |
| | | | cytokines | | |
| SAR156597 | Tetravalent | IL-13, IL-4 | Blockade of 2 | Phase I | Idiopathic |
| (Sanofi) | bispecific | | proinflammatory | | pulmonary |
| | tandem IgG | | cytokines | | fibrosis |
| GSK2434735 | Dual- | IL-13, IL-4 | Blockade of 2 | Phase I | (Healthy |
| (GSK) | targeting | | proinflammatory | | volunteers) |
| | domain | | cytokines | | |
| Ozoralizumab | Nanobody | TNF, HSA | Blockade of | Phase II | Rheumatoid |
| (ATN103, Ablynx) | | | proinflammatory | | arthritis |
| | | | cytokine, binds to | | |
| | | | HSA to increase | | |
| | | | half-life | | |
| ALX-0761 (Merck | Nanobody | IL-17A/F, HSA | Blockade of 2 | Phase I | (Healthy |
| Serono, Ablynx) | | | proinflammatory | | volunteers) |
| | | | cytokines, binds | | |
| | | | to HSA to | | |
| | | | increase half-life | | |
| ALX-0061 | Nanobody | IL-6R, HSA | Blockade of | Phase I/II | Rheumatoid |
| (AbbVie, Ablynx; | | | proinflammatory | | arthritis |
| | | | cytokine, binds to | | |
| | | | HSA to increase | | |
| | | | half-life | | |
| ALX-0141 | Nanobody | RANKL, HSA | Blockade of bone | Phase I | Postmenopausal |
| (Ablynx, | | | resorption, binds | | bone loss |
| Eddingpharm) | | | to HSA to | | |
| | | | increase half-life | | |
| RG6013/ACE910 | ART-Ig | Factor IXa, | Plasma | Phase II | Hemophilia |
| (Chugai, Roche) | | factor X | coagulation | | |

### EXAMPLES

### Example 1: Identification of High Expression and Stable Loci

[0123] Four hundred GS-CHOK1SV™ clonal cell lines (Lonza, Basel, Switzerland) producing monoclonal antibody (mAb), constructed using random integration, were screened for those which met the following criteria: high qmAb (>1.25 pg/cell·h), stable productivity (>70 generations) and suitable growth (IVCC>1500×10⁶ cells/mL·h, μ˜0.03 h⁻¹). The majority of these cell lines were derived from two published Lonza projects (Porter et al., Cell Culture and Tissue Engineering 26:1455-1464 (2010) and Povey et al., J Biotechnol 184-93 (2014) and the process for the construction of GS-CHOK1SV™ clonal cell lines is described in detail in Porter et al., 2010. In short, a PvuI-linearized Lonza glutamine synthase (GS) expression vector encoding a mAb was introduced into the host cell line, CHOK1SV™, using standard electroporation methods. The transfection mixture was distributed across eighty 96-well plates. The following day, fresh medium was added to the cell suspension in the plates; the methionine sulfoximine (MSX) concentration in the medium was such that the final MSX concentration in each well was 50 μM. As the biomass of colonies was increased, cell lines were cultured in static 24-well plates and then in static 25 cm² T-flasks. Suspension cultures were initiated from confluent 25 cm² T-flasks and expanded for 10 L fed-batch bioreactor culture and cryopreservation.

[0124] The lowest generation number ampoule for these twenty cell lines was cultured to mid-exponential culture phase for analysis of integrated vector copy number using qPCR (primer/probe sets for beta lactamase gene). Five cell lines (964E7, 952C8, 2A6, E22 and E14) identified as meeting copy number criteria (≤5 beta lactamase copies per genome) were sampled for flanking sequence identification.

[0125] Genomic DNA (gDNA) extracts were prepared with cells derived from the aforementioned 5 cell lines and were subjected to sequence capture analysis. NimbleGen SeqCap Target Enrichment (Roche NimbleGen, Inc., Madison, USA) was completed on fragmented gDNA derived from recombinant cell lines using baits designed for regions within the glutamine synthase (GS) expression vector bearing mAb genes. Target enriched pools were eluted and sequenced by Illumina MISEQ® (Next Gen Sequencing, Illumina, San Diego, Calif., USA). The same five cell lines were analyzed by whole genome re-sequencing (WGRS) (BGI, Tai Po, Hong Kong) and two selected cell lines (964E7 and 952C8) were analysis using targeted locus amplification (TLA) (Cergentis B.V., Netherlands) to validate the results of targeted sequencing and WGRS.

[0126] Bioinformatic analysis of sequencing reads was conducted. Capture sequencing data were mapped to genome and vector sequences. Split reads (half from genome, half from vector) were used to identify potential integration sites and the break point. In addition, read pairs that suggest vector insertion (one end on genome, one end on vector) were also identified to provide support evidence for the integration sites. A list of potential integration sites was identified from sequence capture data, and the sites were ranked by the supporting evidence. WGRS data were mapped to all potential integration sites to provide additional support evidence. Reads from WGRS that map across a break point, as well as read pairs that cover the break points were counted as positive supports. For each integration site, left (L) and right (R) were used to refer to the locations of the genomic sequence (always 5′ to 3′ according to Cricetulus griseus scaffold and contig sequences). At left or right sides the vector was inserted in the forward (F) or reverse direction (R). Data relating to cell lines 964E7 and 952C8 were later by targeted sequencing with proximity ligation at Cergentis (Utrecht, NL) see, e.g. de Vree et al., Nat Biotechnol. 32:1019-25 (2014).

[0127] Integration sites were validated by PCR amplification across predicted genome: vector boundaries in all five cell lines. Table 9 summarizes these integration site findings, along-side the beta-lactamase gene copy number, productivity and growth data for these recombinant cell lines. A total of six sites (New Loci 1-6 (NL1-6)) were confirmed by PCR in the five cells lines, three which were confirmed by PCR across both genome vector boundaries (NL1, NL2 and NL4) and three which were confirmed at only one of the boundaries (NL3, NL5 and NL6).

TABLE 9

| Cell Line Data | | | | | | | | Genome | |
|---|---|---|---|---|---|---|---|---|---|
| | Copies β- | | qP | | | | | Vector | |
| Cell | Lactamase/ | | (pg/cell. | | Titer | IVCC | Stability | Boundaries | Scaffold |
| Line | genome | mAb | day) | Host | (g/L) | (10⁶ cells/h · mL) | (G) | Confirmed | Accession |
| 964E7 | 2.8 | H31K5 | 48 | CHOK1SV ™ | 7.6 | 3764 | 81G | Both flanks | gI351515650 |
| 952C8 | 3.0 | H31K5 | 47 | CHOK1SV ™ | 4.0 | 2039 | 69G | Both flanks | gI351517715 |
| 2A6 | 3.7 | cB72.3 | 23 | GSKO | 6.0 | 6122 | 70G | One flank | gI351516540 |
| E22 | 2.6 | cB72.3 | 23 | GSKO | 6.0 | 5109 | 70G | Both flanks | gI351516248 |
| E22 | | | | | | | | One flank | gI351517397 |
| E14 | 2.8 | cB72.3 | 19 | GSKO | 4.8 | 6015 | 70G | One flank | gI351516957 |

[0128] Loci NL1 and NL2 were progressed to SSI landing pad integration, as derivative cell lines 964E7 and 952C8 had similar integrated beta-lactamase copies to the other 3 cell lines, but achieved a higher specific productivity (47-48 pg/cell·day) suggesting these regions support higher recombinant gene expression. The selection of loci from recombinant cell lines generated in CHOK1SV™ derivative hosts and using a GS selection marker (see stage 2 for description of RMCE step) ensured that loci are compatible with a GS expression system based system. These loci have been shown to support stable recombinant gene expression (qP: 23-48 pg/cells·day) without negatively affecting process important to growth (IVCC: 2039 to 6015×10⁶ cells/h·mL).

### Example 2: Engineering of Landing Pads into Combinations of Selected Loci

[0129] Landing pads suitable for subsequent RMCE were integrated into the CHOK1SV GS-KO™ host cell line.

[0130] A landing pad (Landing Pad A: FIG. 2) was initially integrated separately into Fer1L4 (see, e.g., WO2013190032A1 and EP2711428A1) (FIG. 4: Clones 7878 and 8086, FIG. 7: Clone 11434), NL1 (FIG. 4: Clones 8096 and 9113) and NL2 (Clones 9116 and 9115) loci. Clone 11434 (landing pad in the Fer1L4 locus, Landing Pad A: FIG. 2A), was selected for engineering of the second landing pad at NL1 (Landing Pad B: FIG. 2A). This decision was made on the basis of the ability to complete RMCE when using with GS selection, stability of RFP expression in pools during repeated sub-culture and concentration of mAb secreted into the medium of fed-batch cultures at harvest. We have successfully demonstrated the general possibility that a landing pad of A or B type could go into any loci in Table 1. A total of 6 multisite SSI clones were generated (12151, 12152, 12606, 12607, 12608 and 12609). These 2-site hosts have a landing pad in Fer1L4 containing Hpt-eGFP fusion flanked by Frt F5 and wild-type Frt F RTS and a second landing pad in site 2 containing a PAC-DsRed fusion gene flanked by Frt F14 and Frt F15 RTS (landing pad in the NL1 loci, Landing Pad B: FIG. 2). The positioning of the Frt site between the SV40E promoter and selection marker enables it to be used in subsequent rounds of RMCE.

[0131] Targeting vectors designed for RMCE in the CHOK1SV GS-KO™ single and multi-landing pad hosts contained the GS cDNA arranged immediately to the 3′ of a Frt site compatible with the destination landing pad (FIG. 2B). The remainder of the vector contained transcription units for the GOI (e.g., mAb) followed by a Frt site compatible to the second Frt site in the landing pad. Targeting vector DNA (FIG. 3A) were co-transfected with a vector expressing FlpE recombinase (FIG. 3B) (at a plasmid molar ratio of 1:9, respectively). Transfected cells were incubated for 24 hours in the presence of 6 mM glutamine to allow transient expression of the FlpE recombinase. This transfectant pool was then washed and incubated in medium lacking glutamine. The viable cell concentration and culture viability were monitored throughout selection. Successful RMCE was marked by the loss of the Hpt-eGFP gene and replaced with GS gene in the targeting vector. A no-FlpE control was included in all transfections (transfection of targeting vector DNA without pMF4) to confirm any recovery is the result of transient FlpE recombinase expression (RMCE). Upon successful RMCE cells appeared dark under fluorescent microscope or with flow cytometry analysis. As the CHOK1SV GS-KO™ host lack a functional endogenous GS gene, those cells which had an on-target integration of GS were able to grow in the absence of glutamine and 12-14 days post-transfection culture viability was above 95%. As the GS cDNA in the targeting vector lacked a promoter, there was very low probability that off-target integration of the GS gene would result in sufficient GS protein amounts to enable growth in the absence of glutamine. Selection through inhibition of endogenous enzyme activity may have off target effects (e.g. MSX, see Feary et al., Biotechnol. Prog. (2016)) and therefore selection in the absence of a metabolite such as glutamine was favorable. This selection system was extremely stringent, with the percentage of non-exchanged cells (marked by the presence of GFP fluorescence) 14 days after transfection typically at around 2-5% and were easily removed by fluorescence-aided cell sorting. Where two sites are to be targeted by one vector, multiple Frt sites can be arranged as a concatemer simplifying the transfection.

### Example 3: Evaluating Fer1L4, NL1 and NL2 Loci Separately in the CHOK1SV GS-KO™ SSI Host

[0132] The ability Fer1L4, NL1 and NL2 loci to support recombinant gene expression and complete RMCE was then tested. Targeting vector pMF25 (FIG. 3A) and recombinase vector pMF4 (FIG. 3B) were co-transfected into 6 CHOK1SV GS-KO™ (FIG. 4: Fer1L4 loci: 7878 and 8086, NL1: 8096 and 9113, NL2: 9116 and 9115) single landing pad SSI hosts and incubated in glutamine-free medium to select for cells which have completed RMCE. These CHOK1SV GS-KO™ SSI pools were analyzed by flow cytometry prior to RMCE and after 11 days in glutamine-free medium (FIG. 4). As the landing pad in the clones (Landing Pad A, FIG. 2) contain the Hpt-eGFP reporter (detected in the green channel) and the pMF25 targeting vector contains DsRed reporter (detected in the yellow channel), successful RMCE was demonstrated by a change from +GFP, −YFP to −GFP, +YFP fluorescence.

[0133] The SSI host clone 11434 (landing pad in the Fer1L4 loci, Landing Pad A: FIG. 2) was then tested for the ability to produce therapeutic mAbs. Vectors containing transcription units for rituximab, cB72.3 and H31K5 which target the Fer1L4 locus in clone 11434 were created (See FIG. 5). CHOK1SV GS-KO™ pools were then constructed and cultured in batch suspension culture for 8 days. The concentration of secreted mAb at harvest was determined by Protein A HPLC at harvest (See FIG. 6). These data show very consistent expression between replicated pools and between different mAbs (250-300 mg/L).

### Example 4: Evaluating Fer1L4 and NL1 in a Multisite CHOK1SV GS-KO™ SSI Host

[0134] The 6 multisite hosts described in Example 2 were analyzed by flow cytometry to confirm the ability of loci to support recombinant gene expression (FIG. 7). The landing pad integrated at the Fer1L4 loci (FIG. 2: Landing Pad A) contains the Hpt-eGFP gene and the landing pad integrated at NL1 loci (FIG. 2: Landing Pad B) contains the PAC-DsRed gene. eGFP fluorescence was detected in the green channel and DsRed was detected in the yellow channel. The CHOK1SV GS-KO™ host (Host) was used as a negative control. Clone 11434 (landing pad in the Fer1L4 loci, Landing Pad A: FIG. 2) was used as a positive control for eGFP fluorescence. A CHOK1SV GS-KO™ pool expressing a DsRed gene which was generated by random integration (DsRed RI Control), was used as a positive control for Dsred fluorescence. As expected all 6 multisite CHOK1SV GS-KO™ SSI clones (12151, 12152, 12606, 12607, 12608 and 12609) had similar in eGFP and DsRed fluorescence intensities to that of 11434 and DsRed RI Control (FIG. 7). This demonstrated that both sites are capable of supporting expression of exogenous genes. Next the ability of the multi-site host to complete RMCE was confirmed. Targeting vectors pCM9 (FIG. 8A, contains E2 crimson expression cassette and targets landing pad A: Fer1L4) and pCM11 (FIG. 8B, contains E2 crimson expression cassette and targets landing pad A: NL1) were transfected into multi-site CHOK1SV GS-KO™ SSI host 12151. Pools were incubated in glutamine-free medium to select for cells which have completed RMCE. The no-FlpE controls did not recover with RMCE pools. These CHOK1SV GS-KO™ SSI pools were analyzed by flow cytometry prior to RMCE and after 14 days in glutamine-free medium (FIG. 8). As landing pad A in the CHOK1SV GS-KO™ SSI host (Landing Pad A, FIG. 2) contains the Hpt-eGFP reporter and the pCM9 targeting vector contains E2 crimson reporter (detected in the red channel) successful RMCE was demonstrated by a change from +GFP, −RFP to −GFP, +RFP fluorescence. Landing pad B in the CHOK1SV GS-KO™ SSI host (Landing Pad B, FIG. 2) contains the PAC-DsRed reporter however the DsRed signal was not detected on the flow cytometer (FIG. 9). pCM11 targeting vector contains E2 crimson reporter and therefore successful RMCE without the loss of Landing Pad A (containing Hpt-eGFP gene) was demonstrated by a change from +GFP, −RFP to +GFP, +RFP (FIG. 9).

[0135] To realize the benefit of the system for therapeutic proteins, the CHOK1SV™ SSI multisite hosts (See FIG. 2) were tested for the expression of therapeutic proteins outlined in Table 10. Experiments are separated into three phases; Phase 1: Tests the application of multisite SSI to increase qP; Phase 2: Tests the capability of multisite SSI to express a three-gene bispecific mAb across the two landing pads; Phase 3: To express ancillary genes in one site in order to aid the expression of a DtE protein encoded in the other site.

TABLE 10

| | | Therapeutic | |
|---|---|---|---|
| Phase | Rational | protein | Ancillary Gene |
| 1 | mAb genes in | rituximab, | N/A |
| | multiple SSIS | cB72.3 and | |
| | to increase qP | H31K5 etc. | |
| 2 | Bispecific mAb | Cergutuzumab | N/A |
| | and >2 chain | amunaleukin | |
| | DtE genes | etc. | |
| | expressed | | |
| | from SSIS | | |
| 3 | Ancillary gene | Infliximab | Lipid genes from |
| | expression to | etc. | Candidates identified in |
| | increase | | U.S. application No. |
| | product quality | | 62/322,621, incorporated |
| | of DtE | | herein by reference, the |
| | | | miRNA sponge vectors as |
| | | | found in Table 11, and |
| | | | any blood factor proteases. |

[0136] Phase 1:

[0137] The limitation of some single site SSI systems is that a single copy of the necessary transcription units is not sufficient to generate suitable titers for clinical manufacturing. Therefore we have evaluated the option to use multisite SSI to increase the integrated copy number of mAb genes. Two approaches to increasing integrated copy number using the monoclonal antibody, rituximab were tested. In the first approach, a targeting vector was generated that contained four mAb expression cassettes (FIG. 10B: pCM38=2×HC and 2 LC) and targets landing pad A in the CHOK1SV GS-KO™ SSI host (Landing Pad A, FIG. 2A). This vector and the two mAb expression cassette equivalent vector (FIG. 10A: pMF26) were transfected separately (in duplicate) into the GS-KO SSI host clone 12151 (FIGS. 10A and B) and pools selected in glutamine-free medium (for a detailed transfection method see Example 2). In the second approach, a targeting vector that contained 2 mAb expression cassettes (FIGS. 10C and D: pAR5=1×HC and 1×LC) in addition to the neomycin phosphotransferase gene (NEO) which targeted landing pad B (Landing Pad B, FIG. 2A) were generated. A version of pAR5 which lacked mAb genes was also created and referred to as pCM22 (FIG. 10C). CHOK1SV GS-KO™ SSI pools transfected with pMF26 and selected in glutamine-free medium were then transfected (in duplicate) with either pAR5 (FIG. 10D) or pCM22 (FIG. 10C) (for a detailed transfection method see Example 2), incubated in the presence of pMF4 (FIG. 3B) for 24 hours and then selected in 400 μg/mL Geneticin (G418). Consistent with selection in glutamine free medium, No-FlpE controls cultured in the presence of G418 did not recover with RMCE pools. Following recovery from selection, the eight RMCE pools were sub-cultured and then progressed to an 8-day batch culture. The viable cell concentration was determined at days 4, 6 and 8 using a Vicell cell counter and concentration of secreted mAb at harvest was determined by ForteBio Octet using Protein A sensors. Cell specific production rate of Rituximab (qmAb at harvest) was calculated (See FIG. 11). These data demonstrated that both scenarios are viable options for increasing cell specific mAb production rates from the CHOK1SV GS-KO™ SSI host.

[0138] Phase 2:

[0139] For the majority of next generation antibodies (e.g. tetravalent bispecific antibodies) the assembly of multiple heavy or light chains is a recurrent problem. In order to obtain optimal product quality with very few unwanted side products, the selection of an appropriate CHO clone expressing as many as four antibody chains in a stable and reproducible is beneficial. As a result, a large amount of product analytics utilizing ELISAs, RP-HPLC or CD-SDS during clone selection is often required. However, in a multisite SSI cell line, the genes encoding a multi chain protein are driven with individual promoters and are spatially separated across at least two sites. This ensures that copy number and relative expression of individual chains are consistent as early as transfectant pools and enabling empirical fine-tuning of the availability of individual polypeptide chains through promoter strength or copy number manipulation of the encoding transcription units. The advantage of this are that product quality is more consistent, reducing the proportion of misfolded multi-chain recombinant protein produced from SSI-generated pools and cell lines, dramatically recuing the need for early stage assessments. Therefore we have evaluated the opportunity to use multisite SSI to express the cergutuzumab amunaleukin (CEA-IL2v) which is encoded by three genes: LC, HC and HC-IL2 (Klein et al., Oncoimmunology 6: 3 (2017). We tested two approaches for the insertion of these three genes into the genome of the CHOK1SV GS-KO™ SSI host. In this experiment (Phase 2) the mouse cytomegalovirus first immediate early gene (IE1) (mCMV) promoter (EP 1525320) in combination with human intron A (Addison et al., Journal of General Virology, 78 (1997) was used, instead of the hCMV promoter, to drive expression of recombinant protein. In the first approach we inserted cergutuzumab amunaleukin LC, HC and HC-IL2 into landing pad A using targeting vector pAB2 (FIG. 12A). Selection was in the absence of glutamine as described in Example 2. In the second approach CHOK1SV GS-KO™ SSI host was transfected with pAB5 (FIG. 12B) which contains expression units for cergutuzumab amunaleukin LC and HC-IL2 targeting landing pad A (FIG. 2). Selection was in the absence of glutamine as described in Example 2. Subsequently we generated a targeting vector that contained a single cergutuzumab amunaleukin HC expression cassette (FIG. 12C: pAR2) in addition to the neomycin phosphotransferase selection marker gene (NEO) which targeted landing pad B (Landing Pad B, FIG. 2A). A version of pAR2 which lacked mAb gene was also created and referred to as pCM46 (FIG. 12B: pCM46). CHOK1SV GS-KO™ SSI pools transfected with pAB5 and selected in glutamine-free medium were then transfected (in duplicate) with either pCM46 or pAR2 (for a detailed transfection method see Example 2) and selected in medium containing 400 μg/mL Geneticin (G418). Control pools were also constructed: a ‘Mock’ transfection with an empty version of pAR2, and three pools, each which lacked one of the three genes encoding cergutuzumab amunaleukin (LC+HC, LC+HC-IL2 and HC+HC-IL2), to be used for identifying CEA-IL2v antibody species. Following recovery from selection, the RMCE pools were sub-cultured and then progressed to an 8-day batch culture. The viable cell concentration was determined at days 4, 6 and 8 using a Vicell cell counter. Cergutuzumab amunaleukin assembly species were determined by non-reduced analysis of supernatants on 10% Bis-Tris SDS PAGE gels (FIG. 13A) with subsequent densitometry analysis (ImageJ software) (FIG. 13B). These data showed that when cergutuzumab amunaleukin LC, HC and HC-IL2 genes are inserted into landing pad A the expression of individual chains in low and only small amounts of what is believed to be fully assembled product can be seen. In contrast when cergutuzumab amunaleukin LC and HC-IL2 are targeted to landing pad A and HC is targeted to landing pad B, the expression of individual chains is increased and more fully assembled product is detected. The reproducibility of this result (in replicate pools) supports the opportunity of using a multi-site SSI approach to tune relative quantities of each chain to increase product quality. The genes required for bi-specific assembly have been separated across two sites (and not topped up in the second site) and demonstrated an improvement in expression.

[0140] Phase 3:

[0141] Expression of endogenous proteins which aims to increase of the secretion capacity of the CHOK1SV GS-KO™ cell line is a proven approach to increase product titers. Candidates identified from PCT application WO2015018703 A1 and those in Tables 10, 11 and 12 were evaluated in the multisite SSI cell line. In order to test this concept, a vector expressing etanercept (FIGS. 14A, B and C: pTC1) which targeted landing pad A was constructed. This was transfected separately (in duplicate) into the CHOK1SV GS-KO™ SSI host (FIG. 14) and pools selected in glutamine-free medium (for a detailed transfection method see Example 2). pCM39 to pCM45 contain expression units for ancillary genes under the control of the human cytomegalovirus major immediate-early (hCMV) promoter (with its first Intron A) and targets landing pad B (FIG. 14) (Table 11 and 12). In pCM39-42, variants of stearoyl-CoA desaturase-1 (Scd1) and Sterol regulatory element-binding protein 1 (SREBF1) were targeted to the NL1 locus. In pCM43, 44 and 45 a short-lived GFP (or dsGFP) designed with a c-terminus PEST sequence (SEQ ID NO: 38) from sequence gb:CQ871827 was constructed and 6 copies of the miR Target Sequence inserted into 3′UTR for CPEB2A (pCM43), CEPB2B (pCM44) and SRPα (pCM45). These targeting vectors contain the neomycin phosphotransferase gene (NEO) and 24 hours following transfection (with pMF4) of each vector into duplicate pTC01 transfected pools, selection was achieved using medium supplemented with 400 μg/mL G418. Following successful recovery of pools and at least one subculture, a 8-batch culture was established. The viable cell concentration was determined at days 4, 6 and 8 using a Vicell cell counter and concentration of secreted mAb at harvest was determined by ForteBio Octet using Protein A sensors. Integral of viable cell concentration (IVCC), cell specific production rate (qP at harvest) and secreted etanercept concentration are presented (See FIG. 15). These data demonstrated elevated secreted etanercept amounts with expression of mouse SCD1 (mSCD1) and sponge vectors bearing CEPB2A (dsGFP_6n CPEB2A), CPEB2B (dsGFP_6n CPEB2B) and SRPα (dsGFP_6n SRPα) miR binding site in 3′UTR.

TABLE 11

| | Vector | | |
|---|---|---|---|
| Ancillary Gene | Annotation | Species | Reference |
| stearoyl-CoA | mSCD1 | Mus musculus | As described in |
| desaturase 1 | | | U.S. application |
| (SCD1) | | | No. 62/322,621 |
| | ccmSCD1 | Mus musculus | As described in |
| | | codon optimized for | U.S. application |
| | | Cricetulus griseus | No. 62/322,621 |
| | hSCD1 | Homo sapiens | NM_005063.4 |
| sterol regulatory | SREBF1 | Cricetulus griseus | As described in |
| element-binding | | | U.S. application |
| protein 1 | | | No. 62/322,621 |

TABLE 12

| | Target Gene | Sponge Sequence | |
|---|---|---|---|
| | (miR binding | (miR Target Sequence in | Copies of 3′UTR target |
| miR | site in 3′UTR) | Gene 3′UTR | site |
| miR-15b and miR- | CPEB2A | 5′-aggggcaacacagtctgctgcta-3′ | 1, 3, 6, 9 and 12 |
| 16-1 | | (SEQ ID NO: 39) | |
| miR-15b and miR- | CPEB2B | 5′-aagctgtattagctttgctgcta-3′ | |
| 16-1 | | (SEQ ID NO: 40) | |
| miR-34c | SRPRα | 5′-taatcatgttacaatcactgcc-3′ | |
| | | (SEQ ID NO: 41) | |
| miR-708 | CNTFR | 5′-caccatcagattataagctcctg-3′ | |
| | | (SEQ ID NO: 42) | |
| miR-186 | EIF3A | 5′-cagtctaaattgaattcttta-3′ | |
| | | (SEQ ID NO: 43) | |

### Example 5: Transfer of Loci Between CHOK1SV and HEK293 Cells Lines

[0142] In order to generate a HEK293 SSI host, CHOK1SV derived vector integration sites and landing pad locations were BLAT searched against the human genome (version: March 2006 (NCBI36/hg18)) using a stand-alone copy of the University of California Santa Cruz (UCSC) human genome data base. This identifies sequences of 95% (and greater) similarity, in at least 25 base pairs of CHOK1SV sequence. Regions of similarity were visualized in IGV viewer (Broad institute version 2.4). Crispr-Cas9 gRNA were design using an in house Crispr-Cas9 design tool. CHOK1SV and HEK293 loci are summarized in Table 1.

What is claimed is:

1. A mammalian cell comprising at least two distinct recombination target sites (RTS) wherein two RTS are chromosomally-integrated within the NL1 locus or the NL2 locus.

2. The cell of claim 1, comprising two distinct RTS.

3. The cell of claim 1, wherein the two distinct RTS are chromosomally-integrated within the NL1 locus.

4. The cell of claim 1, wherein the two distinct RTS are chromosomally-integrated within the NL2 locus.

5. The cell of claim 1, comprising four distinct RTS.

6. The cell of claim 1, where the four distinct RTS are chromosomally-integrated on the same locus.

7. The cell of claim 6, wherein two RTS are chromosomally-integrated on a separate locus.

8. The cell of claim 7, wherein the separate locus is the Fer1L4 locus.

9. The cell of claim 5, wherein two distinct RTS are chromosomally-integrated within the NL1 locus and two distinct RTS are chromosomally-integrated within the NL2 locus.

10. The cell of claim 1, comprising six distinct RTS.

11. The cell of claim 10, where at least four distinct RTS are chromosomally-integrated on the same locus.

12. The cell of claim 10, wherein at least two distinct RTS are chromosomally-integrated on a separate locus.

13. The cell of claim 12, wherein the separate locus is the Fer1L4 locus.

14. The cell of claim 10, wherein at least two distinct RTS are chromosomally-integrated within the NL1 locus and at least two distinct RTS are chromosomally-integrated within the NL2 locus.

15. The cell of any one of claims 1 to 14, wherein at least one of the RTS is a frt site, a lox site, a rox site, or an att site.

16. The cell of any one of claims 1 to 15, wherein at least one of the RTS is selected from among SEQ ID NOs.: 1-30.

17. The cell of any one of claims 1 to 16, wherein the mammalian cell is a mouse cell, a human cell, a Chinese hamster ovary (CHO) cell, a CHO-K1 cell, a CHO-DXB11 cell, a CHO-DG44 cell, a CHOK1SV™ cell including all variants, a CHOK1SV GS-KO™ (glutamine synthetase knockout) cell including all variants, a HEK cell, a HEK293 cell including adherent and suspension-adapted variants, a HeLa cell, or a HT1080 cell.

18. The cell of claim 17, wherein the cell is a HEK cell or a HEK293 cell including adherent and suspension-adapted variants.

19. The cell of any one of claims 1 to 18, further comprising a first gene of interest, wherein the first gene of interest is chromosomally-integrated.

20. The cell of claim 19, wherein the first gene of interest comprises a reporter gene, a selection gene, a gene of therapeutic interest, an ancillary gene, or a combination thereof.

21. The cell of claim 20, wherein the gene of therapeutic interest comprises a gene encoding a difficult to express protein.

22. The cell of claim 21, wherein the difficult to express protein is selected from the group consisting of a Fc-fusion protein, an enzyme, a membrane receptor, or a monoclonal antibody.

23. The cell of claim 22, wherein the monoclonal antibody is a bi-specific monoclonal antibody or a tri-specific monoclonal antibody.

24. The cell of any one of claims 18 to 23, wherein the first gene of interest is located between two of the RTS.

25. The cell of any one of claims 18 to 24, wherein the first gene of interest is located within the NL1 locus.

26. The cell of any one of claims 1 to 25, further comprising a second gene of interest, wherein the second gene of interest is chromosomally-integrated.

27. The cell of claim 26, wherein the second gene of interest comprises a reporter gene, a selection gene, a gene of therapeutic interest, an ancillary gene, or a combination thereof.

28. The cell of claim 27, wherein the gene of therapeutic interest comprises a gene encoding a difficult to express protein.

29. The cell of claim 28, wherein the difficult to express protein is selected from the group consisting of a Fc-fusion protein, an enzyme, a membrane receptor, or a monoclonal antibody.

30. The cell of any one of claims 26 to 29, wherein second gene of interest is located between two of the RTS.

31. The cell of any one of claims 26 to 30, wherein the second gene of interest is located within the NL1 locus or the NL2 locus.

32. The cell of any one of claims 26 to 31, wherein the first gene of interest is located within the NL1 locus, and the second gene of interest is located within the NL2 locus.

33. The cell of any one of claims 1 to 32, further comprising a third gene of interest, wherein the third gene of interest is chromosomally-integrated.

34. The cell of claim 33, wherein the third gene of interest comprises a reporter gene, a selection gene, a gene of therapeutic interest, an ancillary gene, or a combination thereof.

35. The cell of claim 34, wherein the gene of therapeutic interest comprises a gene encoding a difficult to express protein.

36. The cell of any one of claims 33 to 35, wherein the third gene of interest is located between two of the RTS.

37. The cell of any one of claims 33 to 36, wherein the third gene of interest is located within the NL1 locus or the NL2 locus.

38. The cell of any one of claims 33 to 37, wherein the third gene of interest is located within a locus distinct from the NL1 locus and the NL2 locus.

39. The cell of any one of claims 33 to 38, wherein the first gene of interest, the second gene of interest, and the third gene of interest are within three separate loci.

40. The cell of any one of claims 33 to 39, wherein
a. at least one of the first gene of interest, the second gene of interest, and the third gene of interest is within the NL1 locus and
b. at least one of the first gene of interest, the second gene of interest, and the third gene of interest is within the NL2 locus.

41. The cell of any one of claims 1 to 40, further comprising a site-specific recombinase gene.

42. The cell of claim 41, wherein the site-specific recombinase gene is chromosomally-integrated.

43. A mammalian cell comprising at least four distinct, wherein the cell comprises:
a. at least two distinct RTS are chromosomally-integrated within the NL1 locus or NL2 locus;
b. a first gene of interest is integrated between the at least two RTS of (a), wherein the first gene of interest comprises a reporter gene, a gene encoding a difficult to express protein, an ancillary gene or a combination thereof; and
c. a second gene of interest is integrated within a second chromosomal locus distinct from the locus of (a), wherein the second gene of interest comprises a reporter gene, a gene encoding a difficult to express protein, an ancillary gene or a combination thereof.

44. A mammalian cell comprising at least four distinct recombination target sites (RTS), wherein the cell comprises:
a. at least two distinct RTS are chromosomally-integrated within the Fer1L4 locus;
b. at least two distinct RTS are chromosomally-integrated within the NL1 locus or the NL2 locus;
c. a first gene of interest is chromosomally-integrated within the Fer1L4 locus, wherein the first gene of interest comprises a reporter gene, a gene encoding a difficult to express protein, an ancillary gene or a combination thereof; and
d. a second gene of interest is chromosomally-integrated within the within the NL1 locus or NL2 locus of (b), wherein the second gene of interest comprises a reporter gene, a gene encoding a difficult to express protein, an ancillary gene or a combination thereof.

45. A mammalian cell comprising at least six distinct recombination target sites (RTS), wherein the cell comprises:
a. at least two distinct RTS and a first gene of interest are chromosomally-integrated within the Fer1L4 locus;
b. at least two distinct RTS and a second gene of interest are chromosomally-integrated within the NL1 locus; and
c. at least two RTS and a third gene of interest are chromosomally-integrated within the NL2 locus.

46. The cell of any one of claims 43-45, wherein the cell is a HEK cell or a HEK293 cell including adherent and suspension-adapted variants.

47. A method for producing a recombinant protein producer cell comprising:
a. providing a cell that comprises at least four distinct recombination target sites (RTS) and a gene encoding a site-specific recombinase, wherein at least two distinct RTS are chromosomally-integrated within the NL1 locus and at least two distinct RTS are chromosomally-integrated within the NL2 locus;
b. transfecting the cell of (a) with a first vector comprising an exchangeable cassette encoding a first gene of interest and a second vector comprising an exchangeable cassette encoding a second gene of interest;
c. integrating the first exchangeable cassette within the NL1 locus and the second exchangeable cassette within the NL2 locus; and
d. selecting a recombinant protein producer cell comprising the first exchangeable cassette and the second exchangeable cassette integrated into the chromosome.

48. The method of claim 47, wherein the first gene of interest comprises a reporter gene, a selection gene, a gene of therapeutic interest, an ancillary gene, or a combination thereof.

49. The method of claim 48, wherein the gene of therapeutic interest comprises a gene encoding a difficult to express protein.

50. The method of claim 49, wherein the difficult to express protein consists of a Fc-fusion protein, an enzyme, a membrane receptor, or a monoclonal antibody.

51. The cell of claim 50, wherein the monoclonal antibody is a bi-specific monoclonal antibody or a tri-specific monoclonal antibody.

52. The method of any one of claims 45 to 51, wherein the first gene of interest is located between two of the RTS.

53. The method of any one of claims 47 to 52, wherein the second gene of interest comprises a reporter gene, a selection gene, a gene of therapeutic interest, an ancillary gene, or a combination thereof.

54. The method of claim 53, wherein the gene of therapeutic interest comprises a gene encoding a difficult to express protein.

55. The method of any one of claims 47 to 54, wherein the second gene of interest is located between two of the RTS.

56. A method for producing a recombinant protein producer cell comprising:
a. providing a cell that comprises at least at least four distinct recombination target sites (RTS) and a gene encoding a site-specific recombinase, wherein at least two distinct RTS are chromosomally-integrated within the Fer1L4 locus, and at least two distinct RTS are chromosomally-integrated within the NL1 locus or the NL2 locus;
b. transfecting the cell of (a) with a first vector comprising an exchangeable cassette encoding a first gene of interest and a second vector comprising an exchangeable cassette encoding a second gene of interest;
c. integrating the first exchangeable cassette within the Fer1L4 locus and the second exchangeable cassette within the NL1 locus or the NL2 locus; and
d. selecting a recombinant protein producer cell comprising the first exchangeable cassette and the second exchangeable cassette integrated into the chromosome.

57. The method of claim 56, wherein the cell is a HEK cell or a HEK293 cell including adherent and suspension-adapted variants.

58. The method of claim 56, wherein the first gene of interest comprises a reporter gene, a selection gene, a gene of therapeutic interest, an ancillary gene, or a combination thereof.

59. The method of claim 58, wherein the gene of therapeutic interest comprises a gene encoding a difficult to express protein.

60. The method of claim 59, wherein the difficult to express protein consists of a Fc-fusion protein, an enzyme, a membrane receptor, or a monoclonal antibody.

61. The cell of claim 60, wherein the monoclonal antibody is a bi-specific monoclonal antibody or a tri-specific monoclonal antibody.

62. The method of any one of claims 56 to 61, wherein the first gene of interest is located between two of the RTS.

63. The method of any one of claims 56 to 62, wherein the second gene of interest comprises a reporter gene, a selection gene, a gene of therapeutic interest, an ancillary gene, or a combination thereof.

64. The method of claim 63, wherein the gene of therapeutic interest comprises a gene encoding a difficult to express protein.

65. The method of any one of claims 56 to 66, wherein the second gene of interest is located between two of the RTS.

66. A method for producing a recombinant protein producer cell comprising:
a. providing a cell that comprises at least at least six distinct recombination target sites (RTS) and a gene encoding a site-specific recombinase, wherein at least two distinct RTS are chromosomally-integrated within the Fer1L4 locus, and at least two distinct RTS are chromosomally-integrated within the NL1 locus, and at least two distinct RTS are chromosomally-integrated within the NL2 locus;
b. transfecting the cell of (a) with a first vector comprising an exchangeable cassette encoding a first gene of interest, a second vector comprising an exchangeable cassette encoding a second gene of interest, and a third vector comprising an exchangeable cassette encoding a third gene of interest;
c. integrating the first exchangeable cassette within the Fer1L4 locus, the second exchangeable cassette within the NL1 locus, and the third exchangeable cassette within the NL2 locus; and
d. selecting a recombinant protein producer cell comprising the first exchangeable cassette, the second exchangeable cassette and the third exchangeable cassette integrated into the chromosome.

The application's sequence listing, which the Patent Office published only in electronic form, follows.

SEQUENCE LISTING (43 sequences)

SEQ ID NO: 1 - DNA, 34 bp, Artificial Sequence
  source: /note="Description of Artificial Sequence: Synthetic oligonucleotide"
ataacttcgtataatgtatgctatacgaagttat

SEQ ID NO: 2 - DNA, 34 bp, Artificial Sequence
  source: /note="Description of Artificial Sequence: Synthetic oligonucleotide"
ataacttcgtataatgtatactatacgaagttat

SEQ ID NO: 3 - DNA, 34 bp, Artificial Sequence
  source: /note="Description of Artificial Sequence: Synthetic oligonucleotide"
ataacttcgtataaagtatcctatacgaagttat

SEQ ID NO: 4 - DNA, 34 bp, Artificial Sequence
  source: /note="Description of Artificial Sequence: Synthetic oligonucleotide"
ataacttcgtataatgtgtactatacgaagttat

SEQ ID NO: 5 - DNA, 34 bp, Artificial Sequence
  source: /note="Description of Artificial Sequence: Synthetic oligonucleotide"
ataacttcgtataggatactttatacgaagttat

SEQ ID NO: 6 - DNA, 34 bp, Artificial Sequence; identical to SEQ ID NO: 1
  source: /note="Description of Artificial Sequence: Synthetic oligonucleotide"

SEQ ID NO: 7 - DNA, 48 bp, Artificial Sequence
  source: /note="Description of Artificial Sequence: Synthetic oligonucleotide"
gaagttactattccgaagttcctattctctagaaagtataggaacttc

SEQ ID NO: 8 - DNA, 48 bp, Artificial Sequence
  source: /note="Description of Artificial Sequence: Synthetic oligonucleotide"
gaagttactattccgaagttcctattctctagatagtataggaacttc

SEQ ID NO: 9 - DNA, 48 bp, Artificial Sequence
  source: /note="Description of Artificial Sequence: Synthetic oligonucleotide"
gaagttactattccgaagttcctattctctacttagtataggaacttc

SEQ ID NO: 10 - DNA, 48 bp, Artificial Sequence
  source: /note="Description of Artificial Sequence: Synthetic oligonucleotide"
gaagttactattccgaagttcctattcttcaaatagtataggaacttc

SEQ ID NO: 11 - DNA, 48 bp, Artificial Sequence
  source: /note="Description of Artificial Sequence: Synthetic oligonucleotide"
gaagttactattccgaagttcctattctctagaaggtataggaacttc

SEQ ID NO: 12 - DNA, 48 bp, Artificial Sequence
  source: /note="Description of Artificial Sequence: Synthetic oligonucleotide"
gaagttcctattccgaagttcctattcttcaaaaggtataggaacttc

SEQ ID NO: 13 - DNA, 48 bp, Artificial Sequence
  source: /note="Description of Artificial Sequence: Synthetic oligonucleotide"
gaagttcctattccgaagttcctattcttcaaaaagtataggaacttc

SEQ ID NO: 14 - DNA, 48 bp, Artificial Sequence
  source: /note="Description of Artificial Sequence: Synthetic oligonucleotide"
gaagttcctattccgaagttcctattcttcaataagtataggaacttc

SEQ ID NO: 15 - DNA, 48 bp, Artificial Sequence
  source: /note="Description of Artificial Sequence: Synthetic oligonucleotide"
gaagttcctattccgaagttcctattctatcagaagtataggaacttc

SEQ ID NO: 16 - DNA, 48 bp, Artificial Sequence
  source: /note="Description of Artificial Sequence: Synthetic oligonucleotide"
gaagttcctattccgaagttcctattcttataggagtataggaacttc

SEQ ID NO: 17 - DNA, 48 bp, Artificial Sequence
  source: /note="Description of Artificial Sequence: Synthetic oligonucleotide"
gaagttactattccgaagttcctatactttctggagaataggaacttc

SEQ ID NO: 18 - DNA, 48 bp, Artificial Sequence
  source: /note="Description of Artificial Sequence: Synthetic oligonucleotide"
gaagttactattccgaagttcctatactctccagagaataggaacttc

SEQ ID NO: 19 - DNA, 48 bp, Artificial Sequence
  source: /note="Description of Artificial Sequence: Synthetic oligonucleotide"
gaagttactattccgaagttcctatactatctacagaataggaacttc

SEQ ID NO: 20 - DNA, 48 bp, Artificial Sequence
  source: /note="Description of Artificial Sequence: Synthetic oligonucleotide"
gaagttactattccgaagttcctatactctctggagaataggaacttc

SEQ ID NO: 21 - DNA, 48 bp, Artificial Sequence
  source: /note="Description of Artificial Sequence: Synthetic oligonucleotide"
gaagttactattccgaagttcctatactatcttgagaataggaacttc

SEQ ID NO: 22 - DNA, 32 bp, Artificial Sequence
  source: /note="Description of Artificial Sequence: Synthetic oligonucleotide"
taactttaaataatgccaattatttaaagtta

SEQ ID NO: 23 - DNA, 32 bp, Artificial Sequence
  source: /note="Description of Artificial Sequence: Synthetic oligonucleotide"
taactttaaataattggcattatttaaagtta

SEQ ID NO: 24 - DNA, 52 bp, Artificial Sequence
  source: /note="Description of Artificial Sequence: Synthetic oligonucleotide"
catcagggcggtcaggccgtagatgtggaagaacggcagcacggcgaggacg

SEQ ID NO: 25 - DNA, 52 bp, Artificial Sequence
  source: /note="Description of Artificial Sequence: Synthetic oligonucleotide"
atgtggtcctttagatccactgacgtgggtcagtgtctctaaaggactcgcg

SEQ ID NO: 26 - DNA, 52 bp, Artificial Sequence
  source: /note="Description of Artificial Sequence: Synthetic oligonucleotide"
catcagggcggtcaggccgtagatgtgggtcagtgtctctaaaggactcgcg

SEQ ID NO: 27 - DNA, 52 bp, Artificial Sequence
  source: /note="Description of Artificial Sequence: Synthetic oligonucleotide"
atgtggtcctttagatccactgacgtggaagaacggcagcacggcgaggacg

SEQ ID NO: 28 - DNA, 34 bp, Artificial Sequence
  source: /note="Description of Artificial Sequence: Synthetic oligonucleotide"
acaacttcgtataatgtatgctatacgaagttat

SEQ ID NO: 29 - DNA, 34 bp, Artificial Sequence
  source: /note="Description of Artificial Sequence: Synthetic oligonucleotide"
taccgttcgtatagtatagtatatacgaagttat

SEQ ID NO: 30 - DNA, 34 bp, Artificial Sequence
  source: /note="Description of Artificial Sequence: Synthetic oligonucleotide"
taccgttcgtatagtatagtatatacgaacggta

SEQ ID NO: 31 - DNA, 1951187 bp, Cricetulus griseus
  modified_base (52172)..(52214): a, c, t, g, unknown or other
  modified_base (79001)..(79313): a, c, t, g, unknown or other
  modified_base (108056)..(108564): a, c, t, g, unknown or other
  modified_base (114171)..(114194): a, c, t, g, unknown or other
  modified_base (124957)..(125001): a, c, t, g, unknown or other
  modified_base (133924)..(133933): a, c, t, g, unknown or other
  modified_base (220464)..(220571): a, c, t, g, unknown or other
  modified_base (239660)..(240268): a, c, t, g, unknown or other
  modified_base (291831)..(292319): a, c, t, g, unknown or other
  modified_base (321827)..(321996): a, c, t, g, unknown or other
  modified_base (322776)..(322794): a, c, t, g, unknown or other
  modified_base (327260)..(327294): a, c, t, g, unknown or other
  modified_base (352837)..(353013): a, c, t, g, unknown or other
  modified_base (369896)..(371164): a, c, t, g, unknown or other
  modified_base (399674)..(399863): a, c, t, g, unknown or other
  modified_base (406226)..(406576): a, c, t, g, unknown or other
  modified_base (453719)..(453892): a, c, t, g, unknown or other
  modified_base (454054)..(454253): a, c, t, g, unknown or other
  modified_base (495499)..(496477): a, c, t, g, unknown or other
  modified_base (519979)..(521245): a, c, t, g, unknown or other
  modified_base (582983)..(583123): a, c, t, g, unknown or other
  modified_base (616775)..(616812): a, c, t, g, unknown or other
  modified_base (624906)..(624971): a, c, t, g, unknown or other
  modified_base (639489)..(642305): a, c, t, g, unknown or other
  modified_base (719672)..(719704): a, c, t, g, unknown or other
  modified_base (720531)..(720727): a, c, t, g, unknown or other
  modified_base (726029)..(726071): a, c, t, g, unknown or other
  modified_base (727693)..(727822): a, c, t, g, unknown or other
  modified_base (782249)..(782395): a, c, t, g, unknown or other
  modified_base (851142)..(851163): a, c, t, g, unknown or other
  modified_base (891452)..(891678): a, c, t, g, unknown or other
  modified_base (915448)..(915498): a, c, t, g, unknown or other
  modified_base (941764)..(942265): a, c, t, g, unknown or other
  modified_base (1031556)..(1032172): a, c, t, g, unknown or other
  modified_base (1048641)..(1048698): a, c, t, g, unknown or other
  modified_base (1050767)..(1051047): a, c, t, g, unknown or other
  modified_base (1056545)..(1056666): a, c, t, g, unknown or other
  modified_base (1143444)..(1144121): a, c, t, g, unknown or other
  modified_base (1156625)..(1156734): a, c, t, g, unknown or other
  modified_base (1175145)..(1175329): a, c, t, g, unknown or other
  modified_base (1265159)..(1265181): a, c, t, g, unknown or other
  modified_base (1299864)..(1299992): a, c, t, g, unknown or other
  modified_base (1301977)..(1302157): a, c, t, g, unknown or other
  modified_base (1334798)..(1336039): a, c, t, g, unknown or other
  modified_base (1336397)..(1337755): a, c, t, g, unknown or other
  modified_base (1337935)..(1338890): a, c, t, g, unknown or other
  modified_base (1386211)..(1388539): a, c, t, g, unknown or other
  modified_base (1441387)..(1441514): a, c, t, g, unknown or other
  modified_base (1452638)..(1453257): a, c, t, g, unknown or other
  modified_base (1460781)..(1460828): a, c, t, g, unknown or other
  modified_base (1471004)..(1471013): a, c, t, g, unknown or other
  modified_base (1473989)..(1475484): a, c, t, g, unknown or other
  modified_base (1476799)..(1477339): a, c, t, g, unknown or other
  modified_base (1482117)..(1482212): a, c, t, g, unknown or other
  modified_base (1542738)..(1542780): a, c, t, g, unknown or other
  modified_base (1575935)..(1576259): a, c, t, g, unknown or other
  modified_base (1625182)..(1625435): a, c, t, g, unknown or other
  modified_base (1658452)..(1660406): a, c, t, g, unknown or other
  modified_base (1660985)..(1661024): a, c, t, g, unknown or other
  modified_base (1774223)..(1774271): a, c, t, g, unknown or other
  modified_base (1793329)..(1793818): a, c, t, g, unknown or other
  modified_base (1858210)..(1858223): a, c, t, g, unknown or other
  modified_base (1861362)..(1861398): a, c, t, g, unknown or other
  modified_base (1909232)..(1910030): a, c, t, g, unknown or other
  modified_base (1920861)..(1920951): a, c, t, g, unknown or other
  modified_base (1933768)..(1933896): a, c, t, g, unknown or other
tcattttcatgaagatgtttttaaggtcattctcttctgcatcatctgcgttgtggtgttcaggtcttgctggtgtagggtctctagactcgagtggtgtcatattggtttttctgttgttgaatgtgtttttatattgtcttcttcacatcctttcttccagtgggtatagaaggattctcttcctctcctagtctggtggatggaggcaggactggcaccggagacccggaagtccttggatgtgctggatcctgtggaactgagatctgctgtgtgcagccctctggcatcaggttaccccaggcagggcagaagaagaaacccaccttcctttttttgtaagattttatttatttatttatttatttatttatttatttatttggtaattgattgattgattgactgactgactgattggttgattgattaattgatacaacattctgtctccacatatgcttgcacgccagaagagggcaccagatctcattacagatggttgtgagccaccatgtgattgctgggaattgaactcaggacctctggacgagccagtgctcttaacctctgagccatctctccagcccccgaaacccgccttcttttacttgaagattctccttgatgtcttctgagttcttctacttgctttctttttgtaacatatttactctatcattctgtgtcttacttaaggttatatcattgttgtgacgatacaccatgaccaaaagcaacttgggaatctacaagagtgaccctattgaaaactcctagtaatgggaaatatggagcttggaccagccaccttccgtaaccaggcaaggcttccttccagtggagggactgggacaccaacctagccacaaaaacttcaatctacaatctgtcctgtctgcaagatgtgctgtagtaaagctggcacagaacatgtgggagtggccaaccaatgactggtccaacttaagacccttgccacagagggagcccaagcctgaacctgtctggagggctaggacccagaggctggatagcccagaaacgtaagatagaaccaaacatgaacaccccgcccccaaaaaagtcaatgagccggatactggctagttgcctcatccagccttaatatgagagggtgtgcatagtctcattgcaacatttacaacaagatatgccacgttttcttgatatctctgaaggcctggccttttctgaagggaaatggaggaggagtcgatctgggagaaagggaaggtgggggaagggactggaggagaggagggaggggaaactgcagtcaggatgtaatatatgagagaataaaaatttaaataaagtagaaaaataaaaagaaaatgattcctgccaataaactgttatttgagtgactgcaaaaaagaaaaagaaaaagaataaaagaacttctaaccattataggatatagtagaaagaaagaaagaaagaaagaaagaaagaaagaaagaaagaaagaaagaaagaaagaatgtttaagcattactgatggcaatataaaaaaaaaaacacttccatcacttttggatagcagaatggctattcctcaaaagctaaatgaagacgtagcatactgcccaccaattccactcctgcttaaacttaaagactgaaaagaaaatactcaaataaactctgaacatatcattcacagcagctatatgaacaatatcaaaagacgtaaaatactcaaatgttcatttctggatggataagcaaaggtgttatctacatgcaatgggatattatttagccatgaaatgtaactgataaatgctgcaatgtggatgaacctaaataaaacactacactaagtgaacaaagaaaaaccttaaaaggtcacttatttctcattctttgaggcagggggtcaaaactggtctcaaacttgctagtagtagtccaggccgctctttacagcctgcttcctgtgtactagaaatacaagtgtgtgccaccatgcccaatttgatgccacattaataatttccatttatctgaaatgttcagataagcaatctatacaacacaaaatgcataaagctgttaaccaggggtttggggtgactactaacaaggacaaggtttctctctagagtctagaaaatgttctcaatgaacaacagtgatggctgaagtttataattatgctacaaacactaaactgcatatatcaaaataataacccactccacaaagttgtcctcagacccccaggtggcttctataacagacaaacataaatgtgtgagcaacacacagacatgtacatatgtacacacagaatccttttccagagaggaaagaagaaaggagctaagggtatatctttttatctttttttttcaagacatggtttctctgtgtagcactggctatcctggaactcattctgtagaccaggatggcctctaattcacagagatccacctgactctgccttctgggttaaaggtgtgtgccttgctaagggtatattttttgttttgttttttgagacggtttctctgtggctttggaggctgccctggaactagctcttgtagaccaggctggcctcgaactcacagagatcctctgcatctgcctctgcctcccgagtgctgggattaaaggcgtgtgccaccaatgctcggccctaacagtatatcttgatgactctgtagtaagcacacaagaggccctgagttcaatctccagcaccaaaaaaaaaaaaaaaaaaaaaaaaaaaaaaaaaaaggagaaaaaaaggggaaggggggaagcaagagagaagaggatatctggctatacatataacatctatttcatagatttcaaaacaaacaatattattcaggacaaagaaagtaattctagatgggcagtggtagagcacgcctttaatcccagcgctcgggaggcagaggcaggtggatctctgtgagttcgaggccagcctgttctacaagagcgagtgccaggatagtctccaaagctacacagagaaaccctgtctcgaaaaaccaaaaaaaaaaaaaaaaaagtaattctaaaatgataacgataatagtcaatgaacaagggaacatatgaatcctgtttattcacataggcaaaaagcttcaaagtacttgagacaaaacatggtagcaagtgcatcaaaattgcagcaaacacacattgaattcaatgactctcagtcaacagaagaacttgggggataaaaaggacattagagctttgaacaatatcctgaattagctgacatttgtgaaattcttgtcttagttacagatccggtacctgtgaagaagtgcttggataaaagcaattaaagggagaaggggtctaccttagctcactgatcatgaggtagaagtcacagaagtgggggtgttggaaaacagctcaagagagactgatacaccatgaagacagagctcacatggagagtttttttttattggggggaagggagaaagggcaagagaaagagagtgtagagcagcctcatgggaaaagagaaagaggtacaaagatgcagagacagagaggcagagaggcagacacagagaggtagagaggcagagagagagagagagagagagagagagagagatgaatactgggagacagagagagaggcagagaggcagagaggcagagaaagaggacatgggcaggccatgacttttaaaggggacgtagctatagtgaagtagctgatgacgttgtcaggaccttgagcaggtcagagtactgactgagtactggccagcacatcctgccaggtgacagggagcaggccagcataatgcctgaatggaaaactaatgctagcactcaactagctttctactttaatacagcccagagtgctatcactgtgtgtgtgtgtgtgtgtgtgtgtgtgtgtgtgtgtgtgtgtatgtgtgtgtgtgtgtgtgtgtgttggtgttttgcctgcatgtatatctctatgggggtgtcagattccttggaactggagttacagacagttgtgatctgccttgtgggtgctgggaattgaacccaggccctctggaagaacagccagtgcttttagatgctgagccatctctccagcctggtgctaaccacttttagggcgagttttttccacctcaaataacctaatccaagtgtgtccagaagctcaaccccaggtgactctacatattgtcaagttgctaatcaatattaacaatcacaagtctttacccagtaaccgaatacatattcttgtcaagtgtgcaacaaaaatgcaccaagacacattttattcagagtcactaaacaaacctcagcaaaggcaatatgtatattctctgattacaatggaattcaattggaaatcaggaacacaactcagaaaaaaaatcctcaaatatatcaaaattagaaacctagtattgagctgggcagtggtggtgcatgcctttaatcccagcactcaggaagcagaggcagatagatctctgagttcaaaactagcctggtctacagagaaagttccagaatactcagaggtacacagacaaaccctaagggggagggggagaaacctagtgttaactagcccctgaggcaaagaagaaataaaagggaaagttaaaaggaactttaactgaacttgatgacaaacatgatgaatttgtacagattcttcctcggcttcccaaatgacagcattataggtgtgggtcaccatgccctgcttctcctgacatttttgggagcacagagagtttgggttcagattttgtccaataatttcctaaaagctggcttaacacttgtgcctcatccttgggcatctcctccccattactgggaagaaggggtgtttgtcaccagctaggtaagcttcatttcctggcttcctgtggtcctgctggcttcccagaaaggagacagtttctctggctgacacatggtggtatcgttctcttgttaatgcatattagttttattttatatttctgtgcttatgaatatttagcgtgtacctatgccattacaaaaaaagttaccgaagtgagatacatatagctttgaaataagacagaaatcacaagattgaagatttggttcagagattagcataaagccctaggtttgatccctagtctcaaaacaacacaacagaaaacaggaacaaaatagggaaattcagccaggagttggtggtgcatgcctttaatcccagcactttggaggcaaaggcaggaggagctctgtgagtttgaggccagcctggtctacagagctagctccaggacacccagggctacacaaaggaaccctgtcacaaaaaaaaaaaagaagattctataggacacggtttgttccctgatggaatacctgttgcaactgttactagtatctgtaagtgggccatggccattggttggaaaagaatgtcataccacttgttctggctctagtgtttcaggaatatttggaaatattacaaactataaaaatgttgtttaatagctggacggtgggaacccatgcctttagcactcaggcaaatccctgtgagtttgagaccagcctggtctactgagtgagttccaagacaaccagggttacacagagaaaccgcctcaacaatattgtttaataaatgatttgggggagtggaataaaagggttgtaacatgaaaatccatgagagagactgcaaaggaacacaagaaatacttcagactgatgaacacagccagtgtttgatttaagaagtgtcacagatatacacatgtcaaaacttaccaagtcaaggggctggttaagagtactttccctcttgcagaggacctgagttcaatcaacattgcaagcatagtgactcacaaccagctgtaacttcagtttcatggaatctgttacagctaatcttggttgtcagagtgactggatcacctaaaacataagctactgagtattctgtgaggccttttcttagtcaggttatttgaagcaggaagatccaccctaaaagtgggtaacaccttctggtggcaacctagataagaagacctgggagaaggaaacattggtttttgcctgcttgccctcactctcactggcaagtttatttatcctgttgctgtgccattccttcttcaatattagaaactactctgagcttccaaaatagactgaagcagggcatgggtggcccacacctttaatcccagcactccggaggcagaggcaggaggatctctgtgagttggaggccagcctggtctacagagcgagtgccacgataggctccaaagctacatagagaaaccctgtctcaaaagagagagaaagagagagagagagaaaaaaccaatatagattgaagatcagcagctattcaggaaccctccagacctccaatgtcagattaggactactgtgacacctagcttcaagtactgagccactacaggataggactctccagtttattatggactcattctctgggatggtaagccaaaataaactcttccataagctgttttggtcatggtgttttatcatatcaacaaaaagtaacttaaacagaagttggcaacagaaagtgatttactgccatgaagaacatgaccatgatttttgtaaaaggctttttcttttgggccaccaaccagctcccaaatcaagacacagagacttgctgaagatgctttcttttttccattgtacaattttggcttctttgtcaagtatcaggtgttcataggtgtgtggattaatatctgtgtcttcaattccattgatccacatatctgtttttatgccaataccaagctgtttttattattatagctttatagtagagcttgaagtcaatgatggtgatgcctctagaagttcctttattgcacagggttgttttggctatcctgggttttgtgtttttccacacaaacttgagtattattctttccaggtctgtgaagaattgtgctgggattttgatggagattgcattgaatctgtagattgcttttgttaagattaccatttttactatgttgatcctacctatccaagagcatgggagatttttccattttctgatatcttcttcaatttctttcttcaaagacttaaaagttcttctcatgcaggtctttcacttgtttagtgagagtgagggaaatgtttctctgatttctttctcatccaatttatcatttgtatatagggggctactgattttttttagtttatcttgtaccttgctgtagggagaaaccctgattagatgtaccgctgaccacgcctacttgggcgtggccacagttacataacaggggtttaagaagcagggaggcaagaatgaggctctctctggcttgactgaactgactgggaagcatttctgggtctgtcctgctcaggtgcaaacttggtcactggttcctttgtgtattttccccaataaactactggttatcaacatatctctgactccactttgtaatcatcaataccctgatgttgggacccagcccccacagggtctttaagagttgttttccagcataaccacaggtacctcctattttcctgacctcatcccactaggatcaatatcctgttgtgaaccctttgacctggggtttttgtaagtttgtatatagggctgctccacaataaaggtgagagatattctctcagaaaataaccagttgtcttgtggttcatccaaatctccaggctttcacctaatacttggacttagtggtggccaagggcagccacaccctgccagattactgaaggtgtttatcagctgtaggagttccctggtagaatttttgggatcacttatgaatactataatatcatctgcaaatagtaaaagtttgacttcttcttttccaatttgtattcccttgatctccttttgttgtcttattgctctagctagaactttgagaaccatattaaatagatatggagagagtgaacagccttgtcctgttcctgattttattggtattgctttgagtttttcttcatttaagttgatgttgtcagcctattttctttcagaacccaggaccctaccccatcaatcactaattaagaaaatgccctgcatatttgcctacagatggatcttatggagacctgtagcatgaataataaaaacccagagacagatattgggtttcaagttgaagatcagaaaagcaaagcagccaaaccagcagagagctcttacctctaccaaggctggggcaatcctgacctcaaagtgcccaagactgaatactgaatgccctgctcctatcttacatacctctctagtgctggtattaaaggcatgaactctgtttctattttagactgattcactctcatgtagtcccaggtgcccttcaactcacagagattcatctgcctctgtctcccgagttctgagattaaaggtatgtgccatcactgcccacatctatggctgtggctagctttgcattcagatcttcagtggctttaacagatcataagcaatatatcaccacagagaccttttcttaattgaggatccctcctctcaaataactagcttgcaacaagttgacataaaactatccagcacacttaccaactaggaggcaacaagatggctcaacaaataaagtcacttgtcaccaagcttgacaaacctacatgtatgacctatactgtggaaggagaaaaccaactcctgtaagttgttctctgacctcctcctctccctctccctctccctctccctctccctctccctctctctcttctctctctctctctctctctctctctctctctctctgatacacacacacacacatacacacacacacacatacacaagataaataaacacacaaaaaaatttaaggattagagagaacaagtaatggtaaagagtatgtggcagccgggcagtggtggcacacgcctttaatcccagcgctcaggaggcagaggcaggcaggtctatgagtttgaggccaatctcactagggttttgaggttccatgttaaactcagagtctgtgtgtgtgtgtgtgtgtgtgtgtgtatgtgtctgtctgtctgtctgtctgtctgtctctctgtctctgtctctccctctctgcctatggatcagaatgtagttctcagccaccactccagtatctgcccgaatgctgtcatactccctgccatgacaatggactaactgtgacactgtaagcaagccccccaattaaatgctttctcttattacagttgccttgttcatgctgctcttgcagagaacctaagttcagtgccaagcacccacgtcaggaagctcacaaccacctgtaacttcatttttgggatccaacaccactcttccagactccacaggaacctgaacacacccatatatactcaaacacagacacacacatgcacataaaagtaaaaagaaatcttttttaaaaaatattaagcaacaagccatctgaaattctgaataggaccctagtctgtgttactgtgctgtctgtccaagtttcacatttgtgctgtgtgtttgttaagcatgtctttctgtccctactgcccacgcacttggtatgcatgggtcaggggtcttttcttgctgccctgagcacgtggcatggttcaggagttcctctgcccatgtgccatgggttagaatgtgctgcagcggagtcccctgaggctgctactctgaactccaaccattgctggggccctcacagctgagcctggccaatataggtgagtcttgtttttctatcctcacctgctggtctgtgaggcatgggaagtggggctgtctctgccccaaatgccatcctgctgtgggtcctggcttgtggcgggagtttccctgccctaagcatatggttgcaaggccaccatctgcctggctgcccggccttctctatgctccacacacatggcatgcagggagaccacaagggtctttttcccacccctgtattggcaaagggtctgggattaccagcacacacatccccaggtctctgccctgagcacatggagctggggcagatgaactatctggcctgatcgggaccttctaaagaaatggccttaaagatattaaaaactataaaagggactttgataagagtttttatgttgactgagaaatagagagaatgtaggagactaaagtaataaagagggaaagggaaagagaaatttgtctaagaatgtctaaaagatcagaggaataaaccaaaggtatatagaaagttatagagggttaaagcaagccatagaaggtcagaggaaaattgtcgaaggtcagagaaaaggttgttaaaagtcagagaacaatgtaaactgtttgctatggtttctcatgtctacaaattttaaaaattggtaaaataagttaaaattttaaccatactaagttaattctgatttaaaagttctgtttatttctcaagtaaattatgtatgcttgttttaaaatgttctgtttcctggcataacctaagttctgttacaagcatacagctaaaacaaatggtgcaagtcacctccattttatagccagtcacacggcaaactggtcacatggctgactggtagccattttgctaaggttgaaaaaaaagatacttaaaccgacatcttgactaaagatgactgcatggaaattagaggtaccatcttagaaacaagttttcaattaagatttaaaatgttaatgcttctatatattacagaaagacattaagggattttaaatttctttttaaaaccagttttctaaatgtttatgcttttttaaaatgtttttattaatgtttttacttaaagagcttcaatttagaatcatttttaagcaaagcctgacaatgaaggttcttgttttataaaagctgctaatctattataagatgttacagtttatgttttcagaagttaagtttagggcgtttgtggcgcatacctttaatcccagcacttgggaggcagaggcgggtggatctttgagttcaaggccagcctggtcgacagagcaagttccaggacagcctccaaagccacagaaaaaccctttctcagaaagaagttaagtttaagcacgcagctaaaatgtgtacatgtagctactgtttaaggaatataaggtaactctatgcagtcttaaatttagctgtgctaagtttcaaatatttttctaagttaaaaccagttacagtcaggctgaaaattaattacagaaataagaccttacccagccacctgtatgcttcttgtatgcttaaggcaagtaaccaaacagacctctaatgcttcagagatctgcagaatatgggatttaaattgttatctttaaagtctccaaagaagattatgaggcacctcagttcctgcacctggaccagtgagcctgccagccgcctgccagaacctggtctgtggacaaagctgctggacactggaaaattgattgcaccccctttgcctaggcaaaacaaggtcagtcttttccatgtccctcttctacagtgagaaaaaaaaatcctctcaccttataggcctggtgaagattgctgttctttgagacatctgcctccagctgtaatggagaaacttgggtatagctaactgtatatgaactggcttctgtcacttttttgtagattcagataaaatatacccttctaagatctctgaaatattaatggttgtcagcttgacagcatcagacagtcaggttcactataggctatagtcagtatgttagctgataaagtagtgactacctatttgttcaggcacaagctcaaggtttttaggtttactttggttgttatctaagcataaacttaaagggcttttcatcaggccaaaggcacctctgttcttaaacaggtttctgcttctggcagacacatctgagtatatcagttgctgacaacaggctgttcctaaatagactgcgaaccctagacttgctgtggatgtgaaccagtccagctgatgtggacaccccctgtctctgcaacagagtctgccaacagcttctgatggattccccattgcctaaattccctcttttgcttttgactagcatttcagccttcttaggtccctaacttcatcccaaagtcagcaggaaatagcatgggaaagaatacgtcgcccattttccctggttgaaatgctaagtcagaagaaactcccttgcatggggatgccaatatctctcactccctgatggggactcgagagagacagcaattccatgattggaatttcaaaaaaaaaaaaaaaaaaaaaggggggaaaggagggcccccccccccctttccgccagccataacagccgaacacgtgcttgtctgactttgtcttagtcactaggaggttagatgcctgcctcgtggcaaggagacaatcagaagttagctggtggtgctatgctttatcattctgggtgtgctttaccgacaagtgcacagcaatgactcgaagagcatagcaaccaccctgggagggcctatgggccataacaaccagttgaccaatcaacacagggcaaaccctccaagcctggaggcacaccaatcctgagcctgtgcatacccctagacactccctttatgctgccctatcagatctctatgcagacacttcgagctgtctttctagccatctgccatggtgggtggatgaaagaaccgagctaacatggggttagctcgttaaacaactataataaagcctcgtgctgtttgcatcaaaaaaaaatattaagcaacagattcactaaatgaattttaactatgaaatgaaatacagaattaaaaatttccttagatataaacatacataaagtcaaagccttaagtaaaaaaagagtaagcaagcaagtctcccaaacaactattcactgattcctgaaattgagctgtggaagcaaaatgcattccacttacacagtagttaattcccaaggggcagggaatcatcttctaaattgcaggggcttaaaaggtagaaaagaatgccattatatccacacttaggcaattgtagagtatttaaatgatggatgaaaaacaattgtgggatactgactagtcaaaaaaacgaagcaactaacactcctacataaaagctgtcaatagtttcctgagctagagatatcattgggccatctttgagttattcagagttgtctgtagaagaatcatttaaaggttcacatttgtgttataaatttagggtgaagacttctgttgttgtttccttataaaactgtaccctttatctttttggcacaaaagatacaaagtctctttggtatctgggatataaatcaggggcaagagtgatggaaggcagagagagccggtccagcaacacatgcaaccaagagtagacaccactttggatctggcatcccttggggagtatgattgctatggaacaatcttttctacaccatgaatatgtattactttcattggttaataaaaagcagaaggctggtagctgggtaggaagttaggcaagaaagtcaaattgagaatgctgggaaggagaagggcagagtcaggaatccccaatcagatgcagagggagcaggagatgaactcaccatgctaaataaggtaccaccacgtggcagagcataaataaagaatatgggttaacttaaaatgtaagagctagttagtaataagcctgaactatcagccaaacatttagaagtaacattatgtctccaagtcaattatttggaaagcagctgccaggtatttgggaataggcagtccaagagaaatgtccaattacatacgattttcatctgggtcttcttgtcattttccttctggtaacttttgttatgcttggaaaatttacttttaaagaattgggaaaagatccataacagatgttctcttcaggataagatggacactaacgaggctggagagatggctcagtggttaagagcactgactgttcttccagaggacctggcttcaattcccagcacttacatggcagctaagccaagatctgacaccctcatacagacatatatgcaggcaaaacaccaatgcacataaaaaaatgtaaataaataaataaataaaagttggacactgaaaatagaatcaactgttcaggactgaaccatactgaagaaggctcccctgggctggcatgctagtcagcagagtgtctgaagcagatcacggccagacacaattaacagttcagcatgtccaaatacacagtctgtttcagaagcaagtatttcaaggactatttctattggtaagagcttacagtggacctgttgatatagctcagttagtgggaagtacttgttcagcatgcatgaagctctagatttgatccccagatatgcatacctggtgtggtggttcatgactttaattctagcattcaggaagagggggcagcaaattcaaggcctgccccaattacaaaagaacctacctcaggggaagaggtgagtgggagcattacaagaattatttttctttttccccatgtggtgctagggatctaatctagggccttgcttactcttaacaagcattataccactgagttatacccacaatcctcatataattgctaaaggagtaaagatttgaactgaaatctagttctaattattccatgctatcatcatggattttgatttttgtgctttttgtttttacttcatgaaaataagtgcaatgggaccattcattgctcagagcctattaatagggaaaagctgaaaaaagatggccatgatgaaaatactcaggccaaaataaataagtaaatgaacaagtagatgtggttagcatttaataacaaacactgtgctgagaagcacttaacatagagacagaaaagaaacccataaataagccaagataaaaatgaaacgtagagacaaaggagccattaatttatgaaatttattgttgtaaaaagctgttcaagtgacaacaaagaaatgtgctcttccatttggtacaaaggtgcttcatgatcactgccttgtctccaaagcataaggaaaaactggccaagtccactgttaagccatccactcaggtcaagcaatgcattgatgagtctttcaaagtggtcctgcagagaatgtgtcctttgagagtttgagaactggcagaggtgatctgaaagaaaacccagcaaaagacaatgtaacctgacagtaccatggatgcaggacatggatagagatgacaggaagttcatggtacttatgttacctcaaacctgaaaggaagacacatcagacagaacggcaatgtatatgaggtaagaagccacacactccatcaggtgtgtgaggtctgtgagggactatgaacattacaaccacagtaattaatcggtgaatggggcacacgctgaatacctgattggaatacagacttccttacccacaacagagtttcagaggaagacaggtaataaaaatgatttcaggcactaaaaattactctaaagattgtgggggacaagtggttaataggcatgggaattaggcaggaaaagttgcttctaaacaatgatgttcagaggtgagcacggagaggtagcctcaaaattaaaagaaagaaaccagggaaagagcaagaatctcccaagccaaaacagcatgtataagttcctgagaacagaatataagcaacaaaaaggtcaacagagaatgagtgaagaccatcaagttggaaagtaaccggtacagatcacataggcctgaatcactctctggctccagtgaaaagccaatggagggcccaagcttcagggtaaatgatttgaatcagaaagatcacaccagctgtcatggggcagaccctagaggagaacaagaacagaagcagagaaggtgaaatttctagaattctctagccctgctaagaggggtataaaagcacctgggctattcccatgagcagagccacactatgaccagcaatacccagtcacatacccaacagagatgtgccttacggcacacgcacatggaaacacatagcactatcacatgtacgagctcctacctggaaacaaccaatatggcccatcagcaataaacacacaacaaactgttgtgataggaaaacacactcacagaacaaccacggggtataagttgaggaaaaggaggcagaaattcaagctacatactatagaattcagtttacaagaaatcaaaaccagacaaaaccaaactatagtacaaaagtgggacagggtatggcacaagcctacagttccagcactcagatggctggggagtaactaggaagcacatgaagagcatttctgggtcccaaaagccattctttttgatctcagaaatagttacctgagtgaggtcactgtaagaattcactgggcagggctgtggtggtgcacacctttaatcttagcactcaggaagcagagggtggctgatctctgtgaatttgaggccagcctggtctacacagagagttccagggcagccagggctacacagagaaatcctgtctccaaaagagagacagacacagagacagagacagagacagagacagagacagagacagagacagagacagggacagtgtttcattctgtgaaatagcccaggctggcctggaactcactatgtccagactagccttgaatttgtggctatttgtagcaggctttcttgaactgccagtccccaaatcatgacacggagacgtattaatcatgaatgctcagccttagcttaggcttgtttctctatgttttgttgttgtttttttttttttaacttaaattaacccatttcttttcatctatgtgctgccccaaggttcgtttacctcatctacacactgtccatcctgctttcctgctttcctgcttcctgtgcacatggctggccccctgctggctggttgggtccccttttctctccgccccccagccccaacgatcccgcttctgcctagatattggctgttctctttttatttgaccaatcaggtgccttcggcaggcaaggttaaatagcaacacatctttacataactaaacaaatgcagcataaacaaatgtaacatatctttttttgttgtttctttgttttgctggttgttttttttttctttttctttggttggttgtttggtttttcttttttttctacattgttttattattattacttacattccaatcccactttctcctcccatctgctcctcggagagggtgaggcctcccctaggaagtctactaagtctgtcccatcatttccttgaggcaggaacaaggtcctcctcccctccccccagctcctcactctaccccatccccatgcctagattccacaaagtcagtttgtgcattagagttagatcttggacccactgccggtggcctcatatattattgccccagccacaccactgtcacctgtattcagggagtgcagttcagtcttatgcaggtcctcgggttgtcagacctgagtcagtaatctctcactagcccgggtcagctgattctgtgggtttccccaccatggtcttgactcctttgttcagattatcactcctccctcaccttgattgtactccaggagcttagcccaaaagttagttgtggatttctgcatctgcttccatctgtttctggaagagggttctagcttctctggggttgtggattgtaggctgggtatcttttgctttatgtctggtattgacttatgagtgagttaatactatatttgtctttctgggtctggattacctcactcaggatggcttttttctagttccgtccatttgcctgcaaattttaggatgtcattgtttcttactgctgagtagtacttcattgtgtaaatgtatcacattttttttacccattcttctgttgaggggcatcaaggttgttcccaagttctagctatcatgaataatgttgctatgaacatagttgagcaaatgtccttgtggtgtgaatgtgtctcctttgggtacatgcccaaaagcggtattgcagggtcttgaggtagatcaattgctaattttcttagaaatcaccatactgatttccacagaggctgtacaagttcaaactcccagcagcaatagaggagtgttccccttactccacatcctctccagcataagctgtcatcagtgtttttgatcttaactattatgatcagtataagatatcttagagtgttttgatttgcatttccatatgactaaggatgttgagcatttccttaagtgtctttccaccatttgagattgttctgttgagaattctctgtttagatttgtaccccatttttaattggattatgtggtagtttgatgtccagtttcttgaattctttgtatattttggagatcaaccctctgtcagatgtgaagttggtgaagaccttttcctattctgtagagagtcattttgtcttttgctttagagaagcttctcagtttcattagttctcaattattaattgttgataccagtgtctgtgctattggtgttagttacatttaggaagtggtctcctgtgcctatgcattcaagggtatttcccactttctcttctatgaggttcagtgtggatggatttatattgaggtttttgatccaattgggcttaagttttgtgcatggcgatagttatggatctattttcagtcttctacatgtcaacttccagttatactacaaccatctgtcaaaaatgtgttcctttttccattttatatttttagcttcttataaggtgttcataggagtgtgggttgatatcagggtattcgattccattggtccacctgtctatttttgtgccaataccaagctgttttcatttctgtatctctatattagagcttgaagtcagggatggtgatgcccccaggtgatcctttattatacagggttgttttggctatcctggggttttttgtttgtttgtttttccatatcaagttgagtattattctttccagttctgtgaagaattgtgctgggattttgagggagattgcattgaaactgtagattacttttggtaggattaccatttttactatgttgatcctacctatccatgagcatggaagatctttccatttttttgatatcttctttagagacttaaagttcttctcatacaggtctttcacttgtttggctagagttaccccaagatacgttatgttatttgtggctattgtaaagatggatatttctctgatttctttctcaccctgtttatcatttatatataggagggctactgattttttttttttagttaatcttgtatcctgctacattactgtaggtgtttatcagttgtaggagtcccctggtagaattttgggggtctcttatgtaaactaccatatcatcagcaaatagtgaaggtttgacttcttttccaatttgtatccccttgatctccttttgtggtcttattgctctggctagaacttctagtaccatattaaatagatttagacagagtggacagccttgtcttgttactgatttcagtgggatcattttgagtttctcttcattaagtttgatgttggctgttgggttactgtatattgcctttatcatgaagggtgttgaattttgtcaaaggctttttcagcatctaatgagacgaccatgtcgtgtttttctttcagtttgtttatatggtggattacattgacagattttcatatgttgaatcactgggatgaatcctacttggtaatagtgaatgatttttctgatgtgttcttggattcagtttgccagtattttattgagtatttttgcatcaatgttcatgagggtaattggtctgtaatcctcttagttgtgtctttgtgtgatttaggtatcagggtaactgtagccttgtaaaaagtttggcaatgttccttttgtttttattgtgtggaataatttcaggagtaatggtattagctcttctttgaatttctggtagaattctgcactgaaactatctagccctgggctttttttggttgggagactattgataactgtttgtacttccttaggggttacagttctttatctgttcttgatttcattttggtatgtggtacttatctagaaaattgtccatctccttaaagtcttccaattttgtggagtacaggtttttaaactatgtcctgatgattctctgtatttccttagtgtatgttgttatgtccgcctttttgtttctgattttgttaatttggatattctctgtgtcttgattaatttggataaaggtttgtctattttgctgaatttctcaaagaaccaattctttgtctcattgattctttgtattgttttctttgtttctattttattgatctcagccttcaatttgactatttcttgctgtctactccttctgggtgactctgcttttcttctagcactttcaggtgttctgttaattcactagtgtgggatttttccagcttctttatgtaggcatttagtgctatgaacttttctcttagcactactttcattgtgtcccataaatcgggcaatgttatggggtcattttcattaaattttaagaagtctttaatttctttccttatttcttccttgacccagtggtgaatcagctgatcactgttaaatttctatgtgtttttaggctttatgcaatttgttgttgaattctaactttaagccatgatgatccgattagatacctggagttattccaatttttttctatctgttgaggtttgttttgttactgagtatgttgtctactgttatagtatgttttgagaaggttccatgcagtgttaagaagaaagtatattcttttgtctttgggtggaatgttctatagatgtctgttaagtccatttgagtcataacatattagttcccttatttctctgttaagcttctgtctggcagacctgtccagtggtgacagtgggatgctgaagtctcccactattagtgtggggggcttaattcatgatttaagctttagtaatgtttcttttacaaatgcggagaccttgtgtttggggcatagatattaagaattgagacttccttttgatgggtttttccaatgatgaatatgatgcccttcttcatcttttttgattgattttagttagaagtctattttgttagatattaggacagcttgtttcttaggtccctctgattggaaaatttttctcaatcctaactgaggtaatgtttgtctaaggttgaggtgtgtttcttgtatgcagcaggaggatggattctgtttttgtatccaatttattagcttgtgtctttttataggtgatttgagaccattcatattaatggatattaatgaccagtgattgctagttgctgttatttttgtttttgttggtggtgatggcattgtgtgttcaattcccttctttcagatttgctgctacaagctcatctattgcctgtgttcttgtgaatgtagctgacttccttggcattttccttctagtactttctatagggctgagtttgtggacaggtattgtttaaatctggctttatcatgaaatattttgttttctccatttatgattattgaaagctttgctgggtatagtagtctgggctggcatccgtggtcccttagtgtctgcataatgtgtgtccaggaccttctggctttcattgtttctattgagaagtcaggtgtaagtctgcctttatatgttacctggaccttttattttgcagttcttaatattctttctttattctgtatgcttattgttttgattattatgtggtgagggaacttttttattggtccagtctacttggtgttctgtaagattcttgtactttcataggcatgtccttctctaggttgggaaagttttcttctatgactttgttgaatatattttctatgtctttgagttggactttttcttctatccctattattcttaggttcagtcttttcttagtgtcccagatttcctgcatgttttgtgttaaggatttgttggatttaacattttctttgaccaattagtctatttccaatattgtatcttcaatgcctgaaattctctcttccatctcttgtattctattgtttatatttgcatttgtggttcctgattgtttacccagattttccatttccagagttcccttggtttgtgttttcttcattgactctatttcagatttcaaatcttgaatcgtttccttcacatgtttgaatgctttttcttggttttctttaagggatttttcgttatctcccaattgtttgtcttttcctccatttctttaagggactttttcttttcctctttaagggcctcaatcatcctcaaaaagttatgtttaaggtcgttgtcttctgcttcatctccattgggatgttcaggccttgctgttgtagcaccactagtttctagtggtgccatattgctctttatgttgttgagtgtgttcttaccttgtttctatgcctctcttcttccaatcggtataggaggagcttgtgcttcagggggtctctctttctccaaatggtatagttgggagctgtggttccgttgaccactccttcatgtacaatcagaacagagcctccagtgatcactcttcctggtggaagtgggcccaaggctcaggcagtcgctcctcaaggtgcaggtgggcctacagctacagtaggaagaaggaccaccgctccagtgattgctcctctatgtgaggtggtgctgaggttccagtggtcactataacagtggggtatcttgaaccaagaaatggcaatggatgctggctgggacacaggtgcactttcccacaggaacttcttgtgatagcttctggaagccactgttggaagttgctgctgtcatttcctccagcagtcactccctgctcctgggccagtggctcaggcctccctctaaggctgctcctgggcctgacgctcaggcttccctcaaacatatctttacatagttaaatattctattccacaattgctatcctcccgccttactaatctggctaccttttagcttttagttaagccattctcaattgtgtgcagtttagctctgtgttttttgaggtattcatttcaaccttgtttctactaagaataatattttttttcttttggtggggaaggaaggaagacacagtccctctatgaatctttagctggcttgcctaaaacaggagcttgtggactgcctggaataggtgctggaaagggaacttggatcctctagaagaggaagaagtgctcttaattgataatccatctctccaggtgctctatatgtttttatattaaactaagagagagtgttgccataagtaacccaaaattcctttcaatttatagaatttaaatctttaacaaaccagttaattcaaatctgtaggtaaaccagacttggtgatgcacaccttttatcccaatgctcagaaagaaatgctctcttgagttccaggtaggcctagtctccatagtgagtttcaggccagtcacagatacatagaccctgcctcaaaagagaattatattatcatagcatgggaaccttgataagatatgaacttttatttttggtttgaggacaaattttttacttttatttatctattcattgtgaacaactgcacaagtaatatggatatatgcactttgtgcatgaatatgtggaggccagagatcaaccttggtgtcattgcacaagagctactcacctggtttttgagacagtgtcacactgggacttgggcttatcaactagggtggcccagctggacagtaaaccatagagatcctatctcctccccagtgttgtgattaaagtcttgtaccagaagctaggtgaagtgacacagcctttaatcccagcactcagaaatctgagatatccatatctctctctgtaaattcaaggtcagcttggtctacatagtgaattccaggccagggcaacaaagtgaaaactctgtctcagaaaacaaaaataacaacaaagttgtctgccaggccagaacttgcctttaacctcagctcttggaatggggggaatgggggtcacagagacaggcagatttctgtgaattaaaggacagccttatctacatagtgagttccaggacagttagagctacatagagaaaacgtgtatcaaaagataaataaatagctgagcagtgacagtgcatgcctttaatatcaacactccagaggtagagggagagacaggcagatctctgtgttctaggccggccgggtctacagagctagttccagtacatccagggctacacagaaaaaccctgtcttcaggagaaaaaaattacaacctgatcaccaacctaattgctttttatcaagtgatccatagttaattacaatgaaaaaaagataagaggcaaaattaaaaggcaactgttagagctcaggcaatccaaatatccagaaatgagctcaaactgaattataagaggatttccagcagttagataaaagcatgttttccttgacaacttgtgaaactagttcccatctgtcaaaaggagtaatttcccttacctctggcagagggacaaatggctacctgtggtttcatatcaaagcccatgctgcctccaggctcactcaatccctactcacaagtattagtaatatgtttcaaagtccacactggcctttctcatctcagatccctgctctctttgtgtcccctgcccctgtctacgcttgctatcctcactatcccctttctggctagtctcttttctctcacaggtaaccctggctatgtccagtcagtttgtttaactcactgctctggactcttccagatgcctctttctctctcttattcacaataaaatccttccctaataacggagcggtcatgtcagtaatttctttactgcaccaccttgcatatagcaactaaatccaaagttacactgctatcttaaaaaataatcttgggcactctcggaaaataagagcacatactgtgggggttggagagatggctcagcagacaagagcaatggctgctcttccagaggaccaggtttcaattcccaggacccacatggcagctcacattgtctgtaactccagtcccaggagggatccaaagccctcttctgtcctccacaggctccaggcacacacatggtgactagctacacatgcaagcaaaacatctatacacataaagtaaatgaatgaatttagaagaaagaagggggtgcatattgctcttcctgaggatttgaattagttcctagcacccacattaggtggctcacaatcacttctaactcgagctccagggagatctgaaacttctgacctctgcaagtacctgcattcccgtgcacagacatacacatacacacgactaaaaatagtaaaacagacatacacatacacacgactaaaaataggaaaatagggtctcagaggtggcttagtggtgaagagaaagtgctgatcttccagagggcctaagtttagttcccagcacccacactgggaattcccaactttaagaagagcatttcttggtccaatgtcaggaaagggaaggggcctccagctagtaaactggttgtgttctgaggttttgtcagatagtaaactggttgtgttctgaggttttgtcagacagacagaacaaggaaactcaaaaccccttaccttcaccagcacatagtccccaggctgagctctgaccttgagcccagagttagtgacatcctccacctctgcatcagggaagatcaccttaaggtttgcatcattccggccacacaggtctgtggaagaacgtttgctgaactgcagaaaacagagagaatatatgcatctgtcaggagttctagaagttttaggaggcagacactgctcctgttgtctgaggctctcctgggtctatcacaaagcatttcttttctttcttttttctttttaattaatttatttacgtatccctacaaggccagaagagggtaccaggtctctttacagatggtttgagccaccatgtggttgctgggaattgaactcaggacctttggaagagcaggcagtgctcttaacggctgagccacctatccagccccacagaacatttctttcttttttttttttttttttttttttttttttttttttttctttttttttttaattacaaacaagattgaattacctgacaatcccagttcccttctccctcccttcctcccctaccatccccccaactaaaaccctccctatcacttcccttttcttctaatctacaactgactcaacctttctgctccctcatgacctctgcattctttcttttcttcccttctcattctcgtagctccctcccccctcttcccatgttctcaatttgaacagagcatttcttaatgaggaaatctgaagtctcactttgtgtggctgattcaacaataggacaacatgtggtgcacaacagaaacaaagttctgttgactattttaatgaatcaatgaatctttacagggatacttagagaaacactctcttgaaaaaaaaaaagaaagaaagaaagaaaattcaaaacaccaacaagaaaataaaccagcaaggtcataaaatgaaaaaagtaagacattttgggcttgagattgattgtacagtgtttgtctagcacgcaggaggccctgggtttgatacaacaccacataaccggggcatgagggtgcactcctgtaatcccagtgcttaggaagatatatgcaggaggatcagaaattcaaggtcacccttagctacatagcaattttaagatcaacctaggtaaactacatgagaccaggtctcaaaaaagtaagaccgacataaaagagacacatagtgttattctaaaaggcaaaaaccatgcgtgtgaacttaccccttcaaccaatactagctgggtacaacccactgaggtctggttggctcttgacgcctcttctctgaagatagtaataagttcctccaaacgccttaatttgacttcttctggaacatcgtccttcagcctatgatatgcccgtgtcttctattaaaaaataaaacagaacccaggtcactaaggagttagagaatcctcagggcacaaaggagggaatatattcattctactcacaagttacagacatgtaatttggtccaaaacccaaacctgaaccacatttatttctctagttctgggaacattccatgagaaaagggcaactaaaatagatctttgtagattcattctaaatttagcaaatgaaaatcacactcatggctggcaggatgggtcagtgggcaaaggtgcctgacaccaagactgatgacctgaatccaatcctagccccatacagtggaatgaaagaaccaactccagcaagtggccctctgacctacacacactacaacacatgcacacccctacaaacaggcatacacaaaatcaataagtatacaaataaatacatttaaaaaatcacagactcaggccaggtgctggtggcactcgcctttaatcccagagtcaggcagatctctgtcaattcaatgccagtctggtctacagaatgagttccaggacaggctccacaacaatacaaagaaaccctgtctcaaaaaaccattaaaaaaaagaaaagaaaagaaaatcacagactcaaagttagtcttcatactagtcctaagtttatatttggacacagactaaataatgcatacactaagctactcaccagcgctgtttatagagacacagatataaagcagcctgaatactcactaactagtacctaataaattatggtctatcaacacaatggagtgttaagcaactgttaataagataacaccacaaatactaatgtaattgttccaaaatactccaaaatctgaaattagtaaaatctaatcaacatgcatgtcgttggtgtagaaagcattcatgtttatgaacacataacatgtatctggaaactgataaaagaaagaaatcactaagagtggggctggcgagatggctcagaggttaagagcactggctgctcttccagaggtcctgagttcaattcccagcaaccacatggtggctcacaaccatctgtaataggatctggtgccctcttctggtgtgcagatatacatggaaacacagtgttgtatatatactaaataaataaaatctttaaaaaaaaaaaaagagaaatcactaagagtaattgccttcaaaaagagaactaagcctgggagcaacaaaaggaagaagtgttttaaccttcacacttcattccataagcacctattacctagtcagaaacaataattatccttgaaaagtgtttaaaaactatcctgggtatacacttatatatgtctttattctcatgctcaaatcaagtggagaacaccactgagctaggaaaaagtcaaggaataaaaggaaaagctaaacaccactgtctggagattcaaaccaatctaccctgaaagaactaccatatccacagaggaaaacagaatggggactgggtataagatcctactcgatgtcagcatgttgtaagtaatgataaccatccgatggcactgtaggaagcaccactctaagtgggttacatgcactatcttattcaagcctcaaaacacgcctaagctggtactgctattcccacttcaggaagcaactaaggactttagacaaggtcactgttactacatgacaaaggcacattttgagtgccatacttccattgtgtgttgacaggccacttcccgagtagaccagtcttataaataatttctcttgtgcatctgtgatgtccaggctctggggaagtctcacttctgaaatactgtaaaagatactggcccacttacactgactacagaacactgagcactggacttcaattttgtcttgatttacttatttatttgtttgttttgtttttaagacagtctcaatctatagtccagacctgtttcaaacttaagattcccctgcctcaacctcctaagttctaggattacagccatatatcaccaaacccagctacctgcaaaatagttcataaataggaacactagcttggtaatttttttaagttttatttatttattatttatacagtattctgtctacatgtatgcctgcaggccagaagagggcaccagatctcattatagatggttgtgagccatcatgtggttggtgggcattgaactcggcacctctgaaagaccagccagtattcttaaccactgagcaatctctccagccccaatctttttgggttttatgtgttttttgttttttcgagacagggtttctctgtgtatcccttggctgtcctggaactcactccatagaccaggctggcctcgaactcacatagattggcctgtctctgcctcttgagcactgggatcaaaggaatgcaccaccaccacagcccagcccagcatggtaattttttcatatcaatttgctgaggtttgttggctgtagtgtctaacacccataatgctaatgatcaggcagccaagtgaagcagaaggaaaacaggcttgagtccagccagagcaaaaattaactagagaattaattagagaaattaaaattaaattagagaaattaaaattaattagagaaaatgacggtaagatgctgtgatatagctgggtgtggtggcacacacctttaattccagcaaacaagagcagaaccaggtagatctctgagttcaaggccagcctggttctgagactctgtctcaaaacaaacaaaaaatcctgggattttacaaagtcaaactctttccacccaaccacctccaatgagtcccaagctggtaagaaaacgatgctaattgtctcccattcaggacttacctgcctcatgctgtatgcaaagagaaaaccggcattatactgaacttctcgaagtaaagacactgtctgcaggtgatcatcctctgtctctccacagaagccagtgatgaagtcgctgctgaggctcacacctgtcaatattcaacaaaggaccagtgcttagagactgctactgccgacctcagaaggaatgtgggcatttacgtattacagaaggaaggaaagctgctcagaagtcattacagagcaaggggaaagaggcttgtttttctacaacatgacagaactggctcctccctctacatttccttaagccctagaaaataaatcttggtttcaaatgctagattcagagacactatagacgagcagtttcaaacagccctgcttctgcatggggagggtgagggacagtgctaaagactaaacccagagccttgtatatatgctagacaagcactgttgtgctaacactaacactccagctcccaagtcctacttttactagtcaatctttcggtgcttcacataaacatatacatctatgtatcttgttttgttgctattgttttgataggggatttttttttcctactgtgctagggacagaacccattcaacctctaaactagaccgtatctatgtattttaatttataataactgtgtatatgtatatatgatcaaacactgaatttaaattagcattatgttcatttacaatgcagtagcaaaactatcagatactgaatacttggaaattgctatatggccgggcagtggtggcacatgccttaaatcccattacttgggaggcaaagacagatggagctctgtgagtttgaggccagtctggtctacagagcaagttccaggacagctaggactgttaaacagagaaaccctgtctcaaaatatcaaaaaaaaaaaaaaaagtgctacatgtcattagctattcaattactccccaaaattaaatgacatgactactatttactccattttataaattacaaatcttctttgttgtcatatatccaataatacagtactcaatacaaagccagtatacccagctgccatagcatcctgccccatcagaacaaaagtatgtgtacagctgggtggtggtggcatatgcctttagtcccagcactggggaggcagaggcaggtggatctctgtgagttcgagaccagcctggtctacaagaggtagttccaggacagcctccaaagccacagagaaaccctgtctcgaaaaaccaaaaaaacaaacaaacaaacaaaaacaacccacaaaagtatgtgtacataatacaagaagcacggtggcacatatctttagtctcagcactcaggagacagaggcaagtgggtctttgtgagttcaaggccaacctagtctagtaagctctgggctcaaaaaggaaaaaataaataaataaaagttgagggaaatttctgacattctcaatcaaatataagcaaaatgaagcaaaaacagtaatcttattaggagaaagggggaaaaggtataatgggatgtctaaaatctgcctaattaaagtagaatacgtgatagtgcgtgtttataatcccagcaataacaatgaaagtagaagaccaagttcaaggccaccctgagcaacataacaagacactgtgtcaaaattcaagcgctagagctactcttcagtggcagagcatatgtccacaagacatgaggcttggatttaatctcttgcaatatgcacacagtcagaaagatggaaaggaaaagtggaacagagagaggaaaacagagaagcagcaaatgaacataaaaataccaaaaactatgaaatgacaccataaggaatttgccaaagaggctggaaattgagcaagatgaatttggactgcggtaatgtgctcagcatttcttaatgtacctgggatacattctctgatatgatgaaccaatgccacataagcttcccttgaatatctgcagtaaagaacaaaaagaaaagacctagttgagaggagaagcaaggttacgataagttctcatgaagctgaagttagccttaaacttctgttccacctagctctatctcccaagtgctgggctcttagggctacaccaccacacctgactcaatcttatttaaatgagtactatagaaagataatactatgaattcccacgtatattcatttttcgatttgtgatttcacaaccacaaatcacagtagaagagtacatgaaagcacccctttgagccagtgagatgtttcagcaagtagatactttctaccaaacctgatgacttcagttcaatccctggaacctacatggtagaagaagaaaaccaactcctgacaattgtcctctgatttacatgcacacatgttccagctcctaaggacctttcatttaataaatcaagaaaaaaagtaaacacttaagaggacctctaggggctggagagatagctcgatggttaagagaactagctgccgctgcagagggcccaggttcagttcctagcgtccacatggcagctcacaatcatctgccactcccattgcaggggatctgatgccctcttctggcctccgtgagaagtgcatgcacatggtgcaggcatacacgcaggcaaaacacacatacacgtaaaaaaagaggatccctagatctttgcctctgtggaaaataaggccaagttctagttctgtgagctttgccttaggtcatattacccccctccagtttcacctctgcaaacttatttccaaagtgagtcaagtgatctacattcatattctaagacctaaaaaactttattattcttgcaaggtaaaaggctaaaatttcaaatatggcacccagcaagcacttaattttaaaaaaatgttaagcaaatgagaggctcaatgcttactctgcttaggggatacacagaagaaagttcagctgtccatagatacattcaaacaacaaccacttattaatttgctactgtgtgtcatatactatactaggtccttagcaacaaatgcagtgtttagtgattcagaaaaactggaatggttaaggatgtcctctccccaagtatgtctgaccctctcctcatggcatccagtacacggttgcttccactctgggctggcagatggatctgcttgcagatgttgtgtctctcatgaatcagctgtagaacctgattaaacaaaacacaatatgggttacctaagtctcaccaaagaatcatgtaaaaaagaatattctatacattctgaaagggtgcagatggaagtttctgtcctgtcaggtcctgcagccctttagtcccaaataaacactcagaggcttatattaattataaacggtttggcctattgcccaggcttcttactaacaaactcttacaacttaaattaacccacaatccttatctatgtttagctgcatggcttggtgcctcatctcattctcatcttgcttcttctgcctctggttctcgactcactctgccttctttttcccagaattctcatagccccgcttatgtctcctgcctggctcctggccaatcagtattttattaaaccgatagaggtgacaaatatttacagtgaacaagaacattatcccatatcaggagggggttgctgttgttttgttttgtttacaggcattctgcctgaccctgcctcctgagtcctggaattaaaggtgtgtaacatagtacttggtagtatactcctctcattgtttctcctcagaggctaattttcaagtaatgaaaaggttgattgggaactgaggataaagctcagttagtgtagtgactgcttggcattcatgaggctctgggttcaatcctcagcagtgcataaaactaggcatgatagtgcacatctgtaatctcagcacttggaggagaggggaagaatcaggagttcaaggccagcctcaactacacagaccaacatggactgagacctgtctcaaaaaataggaagaaagagccaggcagtggtggcacacacctttaaccccagcacttgggaggcagaggtagatggatctctgaattcaaggccagcctggtctacaaagtgaattccaggacatccagaacagtcaggactgttacacagagaaaccatctcaaaaaacaaaagaaaaaaagagacagtcttgctaagttgcccttactggcctgacactcataatccacctatgtcaagctcccaaagctaggactataagcatgtatcactcactgaccaagagctgggatttgaacccacgtgtgcctcaggcttcccactacatcacattgcctcccttgctgttctcactgtatctccaccatgcagctgcccaccttgataaacttctcactacacaagtggccccaagttcccactgaaaaccatcctatcgcctcactgatcttaggggaatttaagttttgccaaaaggccagtaattctgcaaggagacattgcagtgtaacacagaatccccaaagcaggattcaaggtctctgccgtatacttctgggtccaggtaataatatgcttcaggatgctgctaaaagtttgtcacaacactaaatatcagcaacactcacctcatcaggaaaatccttggggtggggagaggtgaaacggatcctcatttcagggtctattcttgaaacctgatccagaagatgggaaaagcgaagccccccttgtttggttttatagttggtagtgaagccacgactgaggttggtaggcactgcattattgaactggatctctgaattgtcccgaaaactattaacattctgaccaagaagtgtcacttcttttagcccctaaaaacaggaaaaacatgttgaaaacaagtttaaccttcttgaacagcttcatctcaaaccactaattaaaaattagctcaatctaccaagagccataaagaaacctgtctttaatctgataatctcacactggagtaccttatctaaagactgaacaacagagtaagaccttaagagtgtacctgcctgtaatcccaactctcaggaagtaaaggcaggtttctgttaccatctcaatccctaaaacagaatatatctatcctaaaggagttttgtactgtaggagaacttaaaatggggaggaggggataactttagtatttaagcaagtaaaaactgagattttacaagctatcagtgatggaactatctgtggatcagacagaggtggaggagacaccacaggctacaaagctagaaaggctatcctcagcctgtccagaacatgctcgtatgaagaaagcttggataacctcacctgctcagagagcttcctcacttcatctagaatggaggcaaccggccgactcctctcccggccacgagtgaaaggaacaatgcagtaactgcacatgttgtcacagccccgcatgatcgacctagggaagaaagtacaagaacacagttaacaggggagcaatgctgtcttagcatgtcccatctctgcagctctcttgggatttttctttggctctggatcctcctgcttctaagctcacactgaactaatgtgaaatccgtaagtgtataatcacagaatatgaaccagactgtaattggtagacatgttggtgaggaagcatagtgttgaggggaaacggtctgactcagcactgtggagtttctaccgttttgataggtatattagatggaattttttatgcagagattgaaaacaaactctatgtctacctatgttataaaagacactctgaggccaggcggtggtggtgcatgcctttaatcccagcacttgggaggcagaggcagatgggtctcagtgagttcaagaccagcctggtctacaaagtgagttccaggacagccaggactgttacacagagaaaccctgtctcaaaaagcaaaaacaaagcaaaacaaaaagatcctgaatttaaaatatagcttgcatttctcatacaatctttttctttgagacagggtcttctgtgggtcagactagacttaaactggtatatagcaaaaaacatggatgaggatcttgaactcctgatgctcctgcctccatttccaagtgttgtgtttacagatatgcatcatcatatctgactctagctttggttttctgacacaaggtctctcaatggagctctaaattgcctagtacatgctgtggagcccagactgcccttgaacgcacagcaagcaatattcctgcctcctgctcccaactgttaggattataagtatgagcctctttcttcccagctgttgttttctatttctgaaacaagggctttccaaataacacagattagcctggagcaacaatcaaccccagagtgaccataaactcacaacaatcctcctgctttggcctcagattgtgagcacacactacagcagtttaaaaaaaaaaaaaaaagttttctatcaagaaagcccaaggcattcccttaagtgaaaataaacttagaacaataatatttatgttttaaaaggagggtaagaaaagtatccatatgagtatatgactacatatacaaggaatacttctagaaagattaaataagaatgactgacatggaaatctttgagaaatggcctgagaaagcagggatgatgggtgtgaggagtcttacggtatcacatgttgttttctgcatgttgtcccataactgttcaaatgcattcctttcccttatgctcaacatagtaaactgaaacatgctcatcctccaggtctcacatgatgactcacacaaaggcagaagtggcactggggcttgtttggactggcatgatatctgcataggtctcatccagagagagaagcacgtttgctgcctgctgacctgactccacaacagccagcagccggggaaggtctcgataggcatccggtccagccaagagatcgactgttttctccctgttgaggatctctcccttcagtctctcagccatgcagcctgggaagcaaaagaaactagtacctcttctgcagttcacctgttttcctggcttttgttcagtgcacataatttataacttgccctggagaccagggtacagaaaacttctctgagtttagtattaccctgcaaaactggacccacacaactgaacccacatcttcaaatacaagaaaaccatagaaatattcagagcaaatcaattaaatgtctggaatgtgcagggaggcatccaaaagcctttcccccattttttccatcactgctggaggtgcaagtcagagcctcccacatactaaccaagcacaccatgagtgagctgcattccctgccccccaaagcctctcaaacatgaaccacctcttctcacagttaaagattacttaccactaagataaaagatatccttacatcagaagtctgtctataagtttacaactacacttaatgcttttttctctttcagcccacaatacttgctaaacccatgagaaattatataaataattatgcagataaaatttgtacccccaaaccatcattttattaagactataaaacctaaaagcataccttttacaaagtctttggaatggttagttgtttggggttttcttaaagattgttttattatttttgtttatgtgaatgtgtgcttgtgtatgtgcacatgactgcaggtgcctgcagttcagtaaagagtgttggatcccctgggtctgcaattacaggcagttgtgaattgcccaacacaaatgctgggaaccaaacgaggatcctctgaaagaacaatatatgctcttaactgctaatacatctctccggccccatagtttggttgtgatggctcagaggttaagagcactgactgctcttccagagttgctgagttcaattcctagcagccacataatggctcacaaccatgagatctggtgccctcttctggcctgcaggcatacacactgacagaacactgtatacataataaataaatcttaaaaataaagagaaaagaagggagggagggaggcagggagggagggaggcagggaggaaggaaggaaggaaggaaggaaggaaggaaggaaggaaggaaggcaccaagtcccaaatcagtcccttacattaaaaaagattttaaaaacaattaggggctggagagatggctcagcagttaagaacactggctgctcttccagaggaccctggttcattcccagcactcacatggcagctcataactatctctaactccagttcaggggatctgacacctttataccaatgcacataaaataaagttaaataatttttttcaatttttttaattattgggtggggtgccgggcgttggtggcgcacacctttaatcccagcactcaggaggcagaggcaggcagatctctgagtttgaggccagtctggtcttcaggaaagccagagctgttacacagagaaaccctgtatcaaaaaaccgagagagggagagagagagagagagagagagagagagagagagagaaaagaaatgatgcacatattctctctcagccttgattgtggacgtcatgtgactagctgcttgacttcctgccttcctgtcttgacttcccctcagtgataaactgtaacctggaattgcaaagtcaaataaaaccttttcttcccttttggtcagggtgcttcatcacagcaacaaaaaaaactaaaatactccctcttgcatctccttcaataaatctcttgtgtgaggtttgctgtacagtgtgactttggggtatttcttagctcccctcagagctggaacacttacagtagtaatggctgcataagcacgtgaatatacttaatactacagaatatatataaaatgattaaaatggtgagttgatgtatacaaccattattttacatttttccatgggggtttctaaaattccaaaagattttatacccaagggcaactataatgaagtgaaaaggaagaaaactcctctagcatctatctatattaatcagtatgactggatacactgtgtgttgactatcaagagtgattaagttaactatactaaaatggacacggtccactaagcataaagttaaatatattaaccaaattggggtcagaaaggatgcatagatttttcttttgattggggtattttttgcatttatttatttatttagcgtgtgtgtgggtgtgcacatgctacagtacccatgtggaggtcaaagtggggtagttggttctctcctcctaccatgtacatccccaaaatcaaaggcagttcaatagacttgatggcaagtgctttccctgctgagccacctggccaaccccccaagcacttatttttgaagtatgtttcctgaccacctagaccagaactgtccaacagagctttcaaacaaggagaagggacgtgctggatggaaatgactggaggtgctgtgtaaattggtggaccctcatcagatgtggctgctgagaagctgagatgtgtctgatgcaaaggaagaagtgcatttttgaaattgtttttcaaatgtgactactgactaccatattggtcaagacaggcctggattttcacttgggcttgcttccgtagttcacatgacaggtaactacactggaaactcgtgttgccctccagactccaaatgctgaaactgtctctccctctctgtactacatgaactgcatcaggctctagggaaaacacatcactatctgagcatctactatttctttatttgtttgtttgtttgggtttttgttttgttttgttttttgaaacagggtttctctctctgtgtaccaactctggttgtcctagaactcactctgtagaccaggctggcctctaactcacagagatctgcctgcctctttctgcctcctgagtgctgggattaaaggcgtgcaccactaccaccctgctaaatgcaagctgttaaatccctcatagcaggaataccattatcctactcttttgaaggtttttgtttgttggttggttgagttttttggtttttggtttttattttggttttggttttggctttttttgagacagggtttctgtgtaacagtcctggctgttcggtcactccgtagaccaagctagcctcgaactcacagaaatccacctgcttctgccttccaagtgctgggattaaaggcatgcaccactgcctgggacatctattatttctaagtgctacaaaaagatcttttagaagcttcatctcatttaatcttgcaatctctaacatcaagtaaaagagattcatggggtagatatggctaatttacaccctgttatccaggcctctaaagcagcaattctcaatctgtggtcacatatcagatatcctgcatatcaataccgacatttcgattcataacagtagcaaaattacagttatgaaagtagcaatgaaaataattttatggttgggggggccacaactgaagggttgcagaatgaggaaggctgagaaccactgctctaaaggaaaaactctaggaacccaagtctcaaaatggaaaaattcattctgaaaatgaatggatacctagaatcccaatcctcagaggtacccgggaacgtgatcgttttgtcttcagggccttcagctgatgtaaacggttccagatggtctgctcagccttctctctgcaaaatccaaagaggccaaaatgagcaggataggagagcaggacagcgaggagaaaatgaaagccatctgagtccttgcaaaggcatctacgttgaattcagggaaggcacacagaggcaaactgggaaagcaccacttgcaatcatcctcttccctctaacaatatcctccctacacatctcaaaatccagactagctttcaagcaaaacccaaaagctccattcttcacaagcccttccccagctcctctgtgactctcctcccttcaagtaccctctaccttaactctacttctcctgaacatggaattttgtttttgttgtttcacacatcctgtagcccaggctaccctaaaacacattatgtagcctgagctgtcctcaaactcacccatatttcttgactacccaagtactgagattacaggcataaaccaccaccccagtttatatatgatatttacttaatattttccatcagatgttagtagactacttacacacctgtcttagtccccatgtgagaccaagttctttggagcctggctttatgatagaaggttcatttccaaatctcccataacaaccaactcagtatcattccacaggtcccataaaaaatgtgtcagattaacaaactaacgtgaaaggcagctgtggaaatagtaacactaacatgccttcaacagcaataaacaacaaaaaaagaggatgtgttcactttttcttaattcatttttaaaatttgttatgtgtatgggtattttgcctacatgtatgtgctcccaccacccctgtgtctgggatctgatcccctagaattggaactacagacggttgtaagctgccatgtgggagctagggattgagcctgagtcctctagaagagcagtcagtgctcttaactgctgagccatctctcaagtctatcacttttgatgaatttcctgtgatcaggtacttcttggcaagctctgaagataccactcatatcttttcagaattctgtttcccaaccactggctacacctcaaatcaggtatatatattaaagaatatgacattagagccaggtggtggtggtgcatgcctttaatcccagcactcaggaggcagaggcaggtgaatctatgagtttgaggccagcccggtctacagagctagttccaggacagccagggatacacagagaaaccctatctcaagaaacaaaaaataaaataaaaaataaaataaaaacaaaaaagaatatgccatcagtgaccaaaaaactttaggaaatttgggacctcagcactttgggtttaaaaattctatataatgtacagagcttggtttgggcatttttgtgattactgtttgctttgtagacagtttcattgtgtagtccaggctggtctataactcacaatcctcccaacttctgcagtgcagagattacaggtgtgtattacctgtaatctgtactcagataaaatgggtctggtgagaggaaaaaaaaaaaaaaaaaaactcacagaattgctactgtgagaattaaactagtacatccatgtatgctgtacacatggaaccgaacccacaagacatgctcatcacacatcagccacttatatcaagagtatctctattacagaaaaaccattaactctcggtggcctcgaggcattggctcatctccataagcaagcctccttgacacgattacacacaatctattcactccctatggaaagaacaaatttgtacctgatagagcacgtgacaagaaggatcacatcagcctaatgaagaacaaaaaaaagaaacttataaactttgacattgaccttgcaaaatcactactatgcagtccacctacttttttcctattattatggtaaaacatacatacatcttattttaaccatttttaaggatacagtgctataataagaacactatagtgcaaccatcaccaccatctccttccagaacttcccggggaaagctttgtacccattatgcactaaccctcgagcctcaccttcactccacaagatagctttgttttgttctggtttggttgggttgggtttggctgctctggagacacagtcatgccctacagtcaacatggcctcaaattccagaccttcctgcctctacttcccaaggctgggattgcagacacgtgtgaccacaccaagtctgataacccctctcctgaagatcaacagcatcatgaaggctcaaaatagctggaacacagcatacgctagtcctacagtacacttcactcaaaggaactaactcagcaggcaacatcttctccccaaaaactcactgcatctaagaatctgcaccaaggcagggcagcccaggcccaggaaacagggaggcagggggtgcaagcacctcttggaggttgctggtccgcaggaatccgctcttctgtaaaatggaccaggctatctctgtgtcattcacgttcatctggcagccataggtctcgaggtagactgcaatgaaagggagattgagtaggcagagggccatgtgggtcttcagcctccttcccaaagtgctcagagacacctgaggcaacttgtcatccacaaagtcccctgctgccttgaccctaaaataccatcagctgccagatgtacccccaaattaataatagccttttagaacaaaggaaacacaatatcgtatacacacacctataataaacagggtgtttaaatacaggggaaatgtgccccttaagaaataagggcatagggctacagaaacaattagaacagggaagactaacgatcatttttatccatctgagaaagaactaaattcaaatccccgtattacagtcctccctctaaacaagaggtcctctaacctctgggagcagcagcactgaccagagggtacagacaccacagactaaaaaaaaaacgaaagcagacacggtcatattatgaagtaaaaatacaaatttacaccaagttccaaaacacggatttcacactttggtagaccctttcaaatcatatttctagttacaaccccattaccatcagaaggctattattccaactagaagcagggcatggggggccaaggcaggaggattatcatgaacttgaaaccagaatgagctacacagtgagctccaggcaaacctggactaaagagactgattctttctcaaaaaagcaaaacagaataggaaacatcagctcttcttttttttaagccagggtctcactatgcagctctggctagcctagaactcactatgtagaccaggctggccatgctctgcctctgcctgccaaatgctgagataaaaggtatttaccacgggcctagataattttttatatactttggaagggggggtcacatatgccatttcagaagtcaaaggacaatttgtggtagtaagttctcccctttcaccttgtgggttccagggatcgaactcaggtcatcagacttggtggcaagcaacttctgagttatcttgccagccccaagaataaaactctaaatcagaagtgatgacagacatcagtaattccagaagttaagaggctgaggcaagaggattatgagttttacactaacctgggttacagagcaagacccagattcaaaaggtaaggggcagagttgagcaagatggctcaatggttgaaggcttctgccaccaagcctgatgacacatggtagaaggagacaaccatctctcacaagttgtcctctgacatccacatgtgccacacacagagacacatagagtaaatgtgaaatttaaatggaactttaaaaactgtaattagaacacagattatagtgtttccaaaagcaaccaaagagaggactccaattcctgtgtgcacagctttgagttctagtttgtcttttgaagtgttgaggctgaagaacagagcttcaagcacgctaggcaatcactgtaacacacaactcttcccctgcccaacctatgagtttctttacagcaatgctgcttgggagagcctgatgattctgtaactgagcaacctgcccacactgctaagacagtagagccacagaggctgcgacagagaaaggaaggaagccaaagggaagggagaagtaaaactaaccttttctctgccttcctagaagttcatcccctgtgagatacgggggtgggtcctccacttctggaaaagatggtttctcttgaagaaccgaagcacttcttaaaaaatgctgaaaagttggtccggcggctagcctggagctgaaatccttctcaacaccttctgagctctgcccctctgaactaagacatgaagagctggggacactgctatgtgccctgcaggtcctgagcagcagccaggacacagagctcagtggcccccattttagagacctctgtgcttggaggacacattgtaaaggatgcatgacacctgtggtcctaaatctgcaaaagagtgaggcataccaacatttactgcacactctatacaggtactactctggacacttgcccctcacaaaagcagaagagaggatgctttgggggtggggtgggggcataagaggtgttgagacaatcttagtattatcctgagctggcctggaactcactatgtagtccaggctggggggggtctgcccctaggttttgtttgttcatattttgagatattggtctatagtgcagaccagcctcaaactcctcatccctcctgcctccgtcttccaagtactagaatcaccagcatagaccaccatatccagttcaaaagtactcttgatagtttaccttaacccaagcatggtaaaactgcagtctcagtgccttggaaggataaggcaggaagatcatttgagcccaggggttccaggcctgcctggacaacctagcaaggtctctaaaaacttggtctcgggctgaagagatggctcagcggttaagaccactgactgttcttccagaggtctgagttcaattcccagcaaccacgtggtggctcacaaccaccttaaatgagatccggtgccctctgctggcatgcaggcaaaagactatacaaaataaataaataaaatcttaaaagatttaaaaaaaaaaaacttggtctctcatgctggacgtggtaacactcgactttaatgccagcttttccgaggcagaggccagcctggtttatagagtgagctctaaaacaaccaaggcttcacagagaagaaccctgtcttaaaaaaaaaaaaaaaaaaaaaaaaaaaaaaaaaaaatggacaagggacaagatggctcagtgggtaaaaatgcccgaggctcaagtctgaaatcctcagttaagagctcctgaacccaccgtgaatggaaagaactgacagtggagagaggaatgactctgaccatcacacgctgtgcgcacactcacacacacataatacttttaagaagtggggcgggaggggaacgacccaaagaggcatactaagacttcagcaaccactcatttacacctcacacatcttttcacaggatgggccttaagtaaagtcaatgtgactgctgcctggccaggcaagccccggatcagggagccttctttaagagcgttgggatggggcagcgatcctctctgtggaacctggtgggggcatcaaatgcaagcttaaaggtttgcaccgcacagcgcagggcggagctcttaatgtcagtgaagggggcggaaccgcccgccacatccaagcacgcgattgggtagatactggtgctgggcgtggcaagggggctctgcgtgcacgcccacgagaacccccgcagccacccagcaaggccggtccgacccccatctctgcatcccaaggggagaggctagggctccgaaggacccggtgacttggccaagcgcatacagaagtaggcagcgggactgagctacattcgcagcggcctctctcggggcctcacgccgcccagtgacaccttcccccagtgctcctggcttttccgggacgccgcgagcgcgcccacgccacggcaggtcacccgcagcaagtccctctcaagcctctcacctcccacaaccgcgagaccccgcgtccgaaccggaagctctgtccgctggtgagggtcgctctcaggcgtcctcctctgcgcgccgaggcgtgcaacttctgttccgccgtgacttccgccaacggtgttctaacggaagtgtttcctaccggcctggtagactcaagctacgggctttgaaaaatatttgggtgggaaacccaattatttatatgctaaccaaaaaattttaaataaagcttaaaaaccaggttgggccgagcggtggtggcgcgcgtctttagtcccagcactcgagaggcaggagcaggtggatctctgagtttgaggccagcctggtctcagagagagttccaggacagccagggatacacggagaaaccctgtctcgaaaaacaaacaggttgggcacgtgggcaccctgagagtctgcatctacccttgtcccaagaaaatgagggattcttaggagtgttctgcccttggaaagtaggggctctaccttgtcacccgtctgtcacatgtactcctttcctccctgcaccaggcccttaatggaaaggggccgatggggctggtaaggtggctcagagtgtaagacacctgctgccaagcgtgaggacctaagttcgaaccccagaacatacaaggtgaaagaaaattgactcctgcaagtcctctgacctccacaaatatgccaggggacattcgacaccccccccccaacacaccaacacacacacactcacacgcacgcacactgtctcttggcgaggtatcacactttggtaactccaacactcaggtagcagagcctgacagcctgagttccaatccccagaatccacaaggtgaaagaagagaattgactaccccaagtcctctgacctccacagatacaccatgggatacgcaaccccaccctccggccgccaaacacacacacagatacatatacattaaatgtctcctggcccagcatacttcagtaatcccaacactcaggaggcagaggcggctggtctttataaattcaaggccagacagagatacatagtaagactcggtctcatagtaagtaaatgtaaacgaaattaaagaggggtttctgtggctacctctgaactgcctcacctttcctgaatctcccaaatggccttggacagctcagttattcctcaccacgtctttgcctgtcacgtggctgggccttgacactctcagccactctcccttccctgtggttcatgcctctagccaaggtgcctcttctcccttagacctaacctatagactccacactcaggaaaatgctgagagcaggattcagacagaccagagccctgaggtgagaaccaccctgtgtaacataggtgtttttcaagctccaccataacacctagttttaaagtgtaaacatgtggttgaaacacaaattgcatgtggaatgtggacagtttaaattccacaagcctggcatgataacagaggaaaggcgccccctcctggcatgttcctgtcactactcccaccaaaacactcgatttgggtggagggaaggagaggggcattcccagccttcctctggaacaataagtttttgttttgttttgttttgttttgttttcatctgtgttgtgaatctgtgcagaaagtcagaaacacctctgtgtgggaagctggaaacacctctgtgtgggaagccaaaaaccccgtagcctccaaccgaagctagagtaactggtttctttagtacggtaactctgaaaatctgtgtagggcattctgggcctcactctccacctcattctactatttcaaatatacagatagtgctatggtctcaatgtggtgtctccctcaaatccacatattgaaactgtaaccttcaagaaaatggtaataggaggtaggatctttgcaaagtgattaggccataaaggcagagccctctctcggccttagcaccatcttgcttgcaactcttgcgccatgagatcaaagtggaggaagaagccaatgtgcaggctgaagcacaagggaagaaagatgaggcagaggtccaagtaaactagctcatccacccacgaaggctgaaggagcagaagtaagggactctgaagcctgggaggctggtacaagttgttggactgtgtgctactgttgctgtaagtctcaatggacctggaacatcaccatctgctcacagaaaccacctgagacacttgactgttgacatcacaaccaaaacagtcccgctggcctctgccctggacctgtggcattctggactcattctgttctcacatgtggccaagtgtaactcgtacacaataaatcatctaagcgtgttgtttccgtagtatagtggttatcatgttcacctcacacaaaaaatcatctttctcactgtctcagctcaagaatcaaaaactaaataaatggatagatagatagatagatagatagatagatagatagatagatagataaaggcagagccctccctcatgcagaaacagaggcaggcaggtctctgtgaatttgaggttaagtctggcctatacatatctagctccaagccagcctgggctgaatagtgagaatttgtcttgataaataaataaacttttttttttggttttttgagacaggttttctctgtgtagctttggagcctatcctggcactcattctggagaccaggctggcctccaactcacagagatccgcctgcctctgcctcccgagtgctgggattaaaggtgtgcaccaccaaagcctggctaataaacaaacttttttaaaacaaaaagtgtataaagaggtatgctgcacatgcctataacagtgcttggaaggtggaagcagaagaatcaggagttcaaggccagcctcagctacattaggagttcaaagctagcctgggctacgtgtgaccctatctcaagaatttgtatgtgtaaatcagcactcaggaagcagaagcaagaggtagggaattcaacgctacctagacaatatggtgagttccaggcaagtctggagtaagacctgtctcagaaaattcctttttgatttcataaaaaaaaaatatatgagattaactcattttacagacttaaagatgaggaatacaagagtagtcacatacaaaggctcacactacaagacagagctgtgcagtagttgggacccacccatagttcagtctgatcccaaagtcctattcttagctctgactaactcaacctcagactggctgggttcccgctggggctatgcttctgacagttggataaccatggccaactaatcactgctgactccagtgtccttgcctacaaagtgccaactgtgtggtgaatacactgtggtgaggcatggggagaaaaagggtaaggaggggccaaaggatcagaaaggcactggggctgtggcagtagtccagagatcaactgtggattcctaggccagtgtgggatttggggccgtgaagtttgaaaaaataaacaaaaccctatgatttcaggagattgggaacctcatattctctctgctttaggacctgatgttcatccctctttcaccgaattctactggctgctgaaagttctgatagcaagcactcgctcactcactcactccccctccaccttactgtgagcagggtgtgctctccttctcactgctgacaggcagatggcctgaatgctctatgtgattgactgttcttcacactccactggcctaccgcaggatgaggaaccccaatcaacagccaggagcaaaagtaccctgctctcagcccagttttaactagtaaaactgtagtctaggcacagccaggacagtgaaaataaatgcctgttgttatagccatggagattgaacggggtttgtttggtgcttgtgccgcagtgttctctccggagaaactgactgaagcgtgtttctataagctgtccctgcttcagtgtctcctacagaaatgagaccagctgatgtcccaccatcctctccacttactccctgtgtctgaccaattggaatcacacatttgattttgatggagtttttcctgctgaggatagagacctgctggttttacatcaccaaagactagcacaagatgtatcctagatacttgtaggtgacccgtgggttggtgggtgcaggagtgagatggatgggtaagccagactggaaaatcttcacctacatgcatctccccatttcttggtgcctaatttccaaacatgctaattaagtaacttcatgggacaatttcctcattgaatgaaatttcttgagacttcaaacagaaataaattcaactcaggcactcttagatttcccacccccataatgaaaaacataatgaatactagttgctttgagctgctagattgcacagtcgtttgtcacagagcacagataaagcctgtattcactttgaggcccagttctccagaagggtctcacatcttggtctggttcctcttgggactgcagagccacctcagagtccaaatgtcaagacacaaaccacagacatagagccaggccgcctctgtgtcacaggctgtttattatccaagaagaaggaggagagagagagagagagagagagagagagagagagagagaagaggaggaggaagaagaggaggaggaagaggaggaggagaagacagaggcccccctgggctcaggagaaagtgaacagaaaggttcctcttcttcctcttgccactgaccagctgcagagatctcaggggtggcataggggcctccaggaggcctggcagctctgctgttgactggagacagaatccccacaggggcaggtcccagggtcggaatggcttctgtgtacacaaaatatctctcttcaaaaggcactggtggaggtgagcagtaggaaggctgccccgtcgcaagccagacccactgtcccaggtctgagtcctattccccaagaccaaaccggccttcctcaggctggtctgtagggcccgtgttcccctcctctcccttccctcagaccaaagatgagtaggcagtcggcagaaggacaagtcaagtcacggggtaagtgatcctcttcagggctagtgcatctgacaacttctaggccaagagccccaagcgggtgactttggccgagaggaaggagtggatgataaagaccatagttttaggacacgaatgcaggtccagctgctgcagagtggacagagaaaagcatcaggggctcttnnnnnnnnnnnnnnnnnnnnnnnnnnnnnnnnnnnnnnnnnnncccgggctgctcctggctcagctgcccacagcgtgaagcccttgtcgatgtgcacagagaggttacagggacggccattccacgtgcaggctgcaggagagcagtgaacacaggctgctctgaggctacttcaaagatcacaagctccactcaacttcaaaagaagcccccagaatctggcttgatttcccccagatatgggaggctcactctttcatcacacctgaacaaccacctgcccagtcacccctatcctaaaatacagaagagcaggccttcagagaacctccagctgcatctagccccacttctagcacatgtgttggagaagcttgggctggaaggctctgtgagagaggattcagctatcacgtgcaaggtcttgggttcaattctagcacaataaaataaacgagagttaatttctgcgatgtacacagtttatcccataaaggcacaggattgcctggttaaatttaaatctatgaaatttaaagtgggtaatttagattgacatataaataagtgttcattgtttacctgaaattcaaagctaacactggtatactatcttacctatagcctcacccccaagacagattctcacagtgcagccctggcttgcctggaacttgctatgtagaccaggctggcctcaaacccacagagatccacctgcctctgcctctgcctctcaagtgctagaattaaaggggcacaccaccatgtatccttacgagcagaatcacaaggataacataagaaagactctaagaaaaaatgtctcccttcctcccagagcacttgcataccccaaacagggacctcttaaaaggcccaacctccattccttattcccctccacaaatgtcataaagaaaaaaacaaacaaacaaacttgaacgcctctaggcacaagaggctccacctggcacacctgtagacacttcctgtacaccttcggcagcccgatggcagccatccaccagctgtcgagtccaggctgccagctcttgtggtgactccacactgaatagatgagtgtccacaccgtgacgtgtgcccgtgcgcagggcaaaggagagttctgcgtcatagagcactgagcccttggaggggcccgagtgcaccagcctgtatgcagagcagagggacaagcatgagactttgaggtggggtggggtggggtggggtggggccagggaagtgacctgcatccttcagtatcttacagaggacaggaattacagggggtgtgtctcctccaccttcccctgactcacttcaaccttagtggagtcctcacagatactgtcccctccctatctcccactggctcacttcttcacgtcctgtggatctttgttcaaatatcccctcctctgagaagatctgtctaaaatagctcctttgtcactcactggccttacttttcatcaggactgctgaaattatgcattttgaatgcttttattatttgagcagggtctcactaggtagccttgctagcctggaattcactgtgtagaccaggctgatcttgaacttgccttgaacctccagcttcagcctcctaagtactagaatttcaggtatgtgcccccacactcaaatgtaattatatattttacttattagtttcagtaggcttttgcctttttccctagaatgtctctaaaatagaagtttttgtctattttatgcaacactatattcccagcaatttaaactgagcacatagtagctgtttaataaataattgtcttaattaacaaatcacttgactaggcaggcaatccaaaacctgccacttgtccactggccgagaacccaatccagagagaggagacatggaacaaggaccccagaccttgcagcttgattctcatttgctgctgtggccttaggcagttcactggccctctctggccagcagacctctacattatggcccttagcaacctctgtccctcactctacccactctgtttgcctttagagcctctactaagtcccacactcctcagacccaacagccaccaagcctctgagccacattccctatgtttccacatatactctggacctgactcagcatctcgttgctgactcagcatcccattgaacctcctccataggcaccctcactccagacccactgcccacaccaacgcacacactccaaacctcctattcatccaggacgcctcctgccctctcccatctggcaagcactgagcctgtgagttcccacccatgcactttctactgcaaatgccatgattcttctccatatgcttcctccaccccctgcttccctcagcccatgtctcccaaagatgtggcaggctctcagctactgccctcccctccccagcataagtcctctgtggcaggagtgtcctctagaatacagctagtcgcagtctcctgacttcccagcttaacccctccagcgacactgctgggactggggagatgcctcagtgggaaaagtgcttactgttcaagcatgtgaacctgagtttgggtccctagcatctatgtaaaagccaaacatggcagcagacacctgcagccccagcgctaggggaagctgagacaggggtcactggcctgtcagtctagtcaaaacaagctctgagtccaatgagagaccctgtctctaaaaaagaatatggagtgggcatgataacacatgcctttaatcccagcacttagagcagttcaaggtcagcttggtccatgtgcaaattcctaaccagccatggatacatagtaagactttgtctcacaaaaattaacataaatacatatatatacaaatatatatatacataaacatatatgtatatatggtaaagccaaatgtggtggcatatatctgaaacctcaggactggagggagcagagacaggtggattgtgtgaacttaatggctagccagtctagccaaaaataacaacctctaggtttgatgaaagacaaagtctcaaaaaataaggtagagctaaatagagaaaggtacctgaatatgacttctggtttctatatttgtatgcactcacgtgcatgcacacacacacatacacacacacaaaaaaaaaaaaaaaatcctgctaacacagtgttccttcaccagacagcagctctgtctctttcccccccagttcccatgtggattctgtatgtggttctgccacatttacaggtcatgaacatgttctagccctccatgcctctgtacctctggccacacctaagatgctctcccttgcttcctcaaaagctacagttcttattcatcaaagtccatttcaagtgtcaccttctccttaagtcttccctggccaagccagacagctaagtgtctcctataaccttcaatgtaatggctagacatacataatggttattctgggtttgtctcctgactgactccggattctccctgagggcagtaactattcatgtcactgtgtgtcccctgaaccgtgcagtacaagatgaaggtatcaataactgagtgacagttagcacttcacatttttctgttctgagcctcaactttataaatgggggaaattgtggctgtagggagcagaacttgcttcagatcacctgggaaatagctggaggcagaacagcactggggtttggggcttctggggtccatctggaacaccaccctcccaagtctgagtataacaccgagcgttcctgctcttcagtacctggtggcgatgagcggggcagtacgggctggcctgctcagggcctctcgagtttgggggagagagcagtaaaggagcaactccttctctgtcagcagggccagggttggggctgtacctccactgggcaactgcaagcaaaaaggtaatgaggacggatgggatgaaagaggtcaaagggccgggagggcatggggtgataaggtgtgacagaaatggggcccagcaagcacctgttctgtcagccagccaatctgcttgatgtcctggctcccagctgtacctgtggctgtcagcagtgcctgcagctcatccttgacccaaggtatgaaagtgctgatctgggcttggatggcacctgcccatgaccttgcactggcctcatccttggccctcaagaacagggtatcctggccatctgctgcccctatctccagatacctgaaggcacaatgggataaaagataggacatgtcactggccagctatccatcccagacatctagttcaagaaagccacccactgccaaactggaagaagccacacaggctgtccatgagagataaggattgtgtttagggctgaagagatggctcagaggttaagagcactggctggccgggcgttggtggcacacgcctttaatcccagcacttaggaggcaggggcaggtgtatctttgtgagttcaaggccagcctagtctacagagcaatttccagagacagccgcaaagaaatcttgtctcaaaaaaccaaaaagaaaaaagaaaaagaaaaagagaaaaagagagcaaccaggtgtgatggctcccgtctgtagtgtcagcacattatcaccagggtgggtatagaggcattgcagccaagctcagcaacctgattcccatgggagaagagaaaagttgtcctccagccatcacacatacattgtggcatgtgcacatgcatgcacatacaaaataaacaaatacataaatgtaattcaaaattttaaaacactgaactacctaaactatacagaccccttctcgaaaaagaaaaaaagaaaaaaagaaaaaaaaaaacaggttgggaaatgagataaaatgggtagagagaaaagaaacaaaaagccatgccatcaagtgtggagggagagcaacagtgatactggaaaggttttccaaaatgttttgtgttccgttaaagattcgctcccctttggatttctgtactacaaggagtagggcagaaaggggaggctactcccaacacctagcccatccagctttgcccctgccttcctctactgcagagctgaaagcaaaggacttgagtccatggattcccttgcagttatgccagccacatgacccagttctaacctctgaggctttgacagaggtctctggaaatcaaaggaaaacctttccaaagacagaccaaatccacccctcgctacacacattgtctagttctcccagcacaaggatgcaattcaaaataccagatgtggtagtacaccctgtaatcacaccactggtaaagtgaaagcaggaggatcaagcagaagttcaaggtcctcctgggctacacagcgaaattgagaatagctccagctacttgagaccctttcttaagaagaagaaagccaagagaaccaaggctggaagccaggttcccaagttcctgctcacctgttaatttcccagaggaagatgagacaaagggcagtgtggcacacacctttgatcccagcgagaagagaagagaagagaagagaagagaagagaagagaagagaagagaagagaagagaagagaaaacaagcagtgcataccatcaccctagagttaagtcatgcgtccatttgactcagttgtgaagcacctgcttcatgccagcatggatgctggtatgatgtttgtcacttacatacaacacagatatccttcgtttgtattatctgagtgcctccccactccagcctcacctgggttccgggtcagtgggcgtgcacctccttgagacatatgccatcttcaaggatatatgtttggcctcactgaggttcctgggctggggaccaggggaagaaggctgacgctgaagaggtgaggcaggaggtgagtcccagccaaccgaggtcccgccagcagaattcttgaaatacggtgagacctccttcatgtatttaactggcaagaagagaggccgcctgttaccattgctgcatgaactccatgtagcatatatcacaattgtcgctagttaattaaaagcttactttatggagctggacagatggcccagtggttaagagcactggctgctcttccagaggacccagattctattccctgaacccacatggcagttcacaactgtctctaactccagttccaaaggatccaatgccctcttctgacatcaatgggccattcatgcaaatggtacacagacataaattcaggtaaaatactccaaaacataaaatagtaaaatgaaaataatttttaaaatagtgcagtccataaacagatgcaatcatctcagaattgctaacatcagacttggaacccttacctaaacataacatttgagctatcaagcacaggtaaacacacactctctctctttctctctctctctctctctctctctctctctctctctctctctctctctctctctttctctctctctctctgtcactatttaaaatttttaaagatgatgtttgatttaaagcaaaacatcttccaggcatggtgatatcagacagaagcgtcaggagttgaggtcagcatgggtgatttagctagaccccatctcaataatcctacttcaaggccagcctgatctacagagcaagttccaagacaaaaaagaaaaaaaaacaaagtaaataaaataagcacatgactgtaaaccaagcatttgagagctagaaaaagagaaatcaggagtttgagactagcctgggccgcacaagcccatctcttcaaaaaaaaagggggggggcaggaagtgactccagcagaatacgtgtcttccatgttcagattcctgagttcaatccttggtaacacacacacacacacacacacacacacacagagagagagagagagagagagagagagagagagagagagagagagagaaagaagcaatggaagggggtataagaaatgaagacagagttgtatgatggttcacacctgtaatcccagaactcaggaggatggggcaggaggattgacaagaattggatgccacagagtgtggctctaaactgtcctaatgctgtagccctttaatacagttcttcacgatacagagacacccctcaatcatagaactatttcattgctactttataaatgtaattttgctactattataaattgaaatgcaaatatctgatatgcaggttagcctatatccaaccctgtgggggtctcgacacacgggttgagaaccattgctacagtccaggcgtggtagcacctgcctttgatcccagcactccagaagcagaggcagtggcaggggcagaggcaggcagagcctctgtaaattcaaggccagccttgtctatagagtaaattccaggatagtcaaaaccacacagagaaaccctgtctagaaaaaaaattttaaaaagcaataaataaatgtaatatagaataaaataaaaagtaggaagaatgaaagaggatggagagaaaaaggaagagaggaaggaaggaataaagggaaggaaaaagaagagaaaaacttccactacattcttggccttttaattttcctttcagatttacttattttattttatgtgtatgaaagttttgctcaaatgtatgtctgtataccacatgtgtgcctggtctccttagcagtcaggagaggacaccatgaatgccatgtgggtgctaggaattatgcccaggtcctctgcaagaacaagtgctcttatcggatgagccatctctccagccctgttgttggcctttttgaaacagagtctcatactgtcctccccaatactggattgtaggcatgtaagatcaagtccagctaatttttttttgagataaagtttctctttgtagacctgactgtcctggaactcactctgtagaccagactgaccttgaactcagagatctgcctgcctcggcctaggaatgaaggggtgtgtcaccaccatcccctggcttacttttattatctttaaggcacagtggttaatgggtttatttcttacatgggcagttagtatcttaagcagtatatgtgcccagggaccctggcagatctcacaatatcactgagagggtacagtggaccttctgtgatggttgaaatgtattgctctatacaaaagagtctgcctctggtcacacactgcaatgagtacatggaatgagaccagtacaaacagaattgcttaaaagattgtttttttttttattttatgtggctaggcactgcatgggtgcaagtagccacagacaccaaaagagggtctcagatcccctggagctggtgttacaagcaattgagagtccacctgatatgaggactgggaaccaaacccagcccctctacaagaacagcagttctcttaaccactgagctgtctctccagtccctaaacagaatcaaaaaatttttactgctgcaattaaaattaattttagaaaccaggtgtggtggcccacaaacactggtaatctcagcactcatcggacaaaaacaggaaggtctgaagttcaaggtcatccttggctacataaagaatccagagccaatatgagttaaacaagactgtctacaacaagccgggtgctggtgccacacacctttaatcccagcactcaggaggcaaagacaggcagatctctatgagttcgaggccagcctgatctacagagtgaattccaggacagtctccaaaactacacagagaaaccctgtctcgaagaaggaaaaaaaataaataaaaaaaaaaaaaacttagggctaacaagaggctcatcaggtaaaggcacttgccaccaagtccaatgacctgagtttgattcctagaacccatactgttgggaggtgagaaccaactctaaaagtcatcctcttcccttacctccatataaacactgtgtcatacccccatccctgcctaccagtaaacagtaatttaaaacaactagaagtaaactcaaatagtcacagagaactaagggcaaccacaatgggcaggacagtcctagaatatatgcttctctgacatgtgaccctaccctacaagctgtgctagggacaggaaaggacatctgagccaaaaagctgccagactgggatccaaagagtgtatcctgggagttggatgcaggaggatcccaaggctaagattatatccagttataaagcacattcaaacccaggacctgtctcaaaagaaatagaaacaaacctggatggtggtggcgcacacccttagcccaggactcgggaggtagaggcaggcagacctgtgagtttgagccagcctggtttacagactgagtttcagaactcccaagaactgttacagagaaacctgtacagaaaagaaaagaaatagaagcaaagtcttgagattggccaggcctgaggaattcagagtcatccttaactatatagggaatctgagatcaatctgccttttataaggagagagaagacagaatcttgaggaggcattgtggctcacacctgtaatcctagcacttgggagagtctaaggcaattgaattgtcaagagttataggttagcttgggttacagaattaggccctatcttaaatgactgaaaaggggaaaaaaaaaaaaaactaaggaagggaatttagctttagttcaggggataagtgtgacactagtgtctgggtcttactcttgccttcactgtcatagccacaggaggactgccatagctcaagtcgatcattccttatgtcacaaaatacaaagcaagaagagaggagaccagcagaaaaatggctgtttccttgcatctgtctaacaggtgcctgtggaggccagaggtgttggatcccctagagctgaagtcacaggtggttgtgagcaactttatgtggatgctgggaacccaactccggtcccctgaggtcagtgttcccacctggagagaacactgtcagggcaagaacttcatgtgactcatctatgccctcagaatccggctggcttctcatatgctacatgctcagcaaatgaacatttgtcaactctgaagccaaagaaaccattagagtcaccgctcgtctggctgtccctgaaccaggtcatctttctccattcccacaggaatgtactataaatgaggagtgttctagctggtgccagaaacagagcttggatttcacagaccaagtgacctctccctgaatgagggtggaaacctgggggccccagagtttggccataaatagcccagttccgaagttgcctcccactctgatttctgcctgactcatttgagcagatagggtgggactgactacagactatggcttctagcactgagggacatgactgtggctggtcgccagggtcatggaatctatgacgttaggcccagccagagtccacattctccccaggcaagtctctggcccagaagcctggacaagctcacacaggaagctgaggataatgaaggaagccagaggttagctctggccccaggacacaggaagagattccactcaaggcattccactagattctacaatggagcaaggccatacccctgcccagtttaactaagagcacagggtctcatatgtcttgctaagaggagtcatttgttttggctcaatgcaaaaaatgttcagaatgcatcccagggctcattaagtgcctgtgactaaatgtcctggcctggaatcttggaaaatctgttggctacgctcaacctgttccctgtctgttcagagtgggtggttacttcccctgttgaaattatactatggacttatctttttactaatctaaggcctctctactctaatccaaatgtcaatactgtgaacagaggaacccaatctcattttccagggcacacccagcttctactagcatttgattgacctacactagctagcagaagaataacacaaaccaagtgtggtaatgcatgcctgcaattccagcactggtggctgaggcatgaagagcaacattaagaaccacataggccgggcagtggtggcacataccattaatcctggcactcaggaggcagaggcaggtggatctctgagttcaagtccagccaggtctacaaaacaagttccaggacagccagtactgttacactgagaaaccgtctctaaaaaccaagaaccaactagccttaactctagttcccagggctgtcctgccttctaaaggtgctaggcacacaagtagtatacatatgtttgcagacacaacactcatatacacagagaaaaaataaatgtctattaaaaaaaaaaacttcttaaaccaagtagtggtgcacacctttaatcccagcattggggaagcaaaggaaggcagatctctatgagtttgaggtcagcctgatctataaagatagttccaggacatccaggtctttgaagagaaaccctgtggggggaggggggagtggaaaccttccttccttcttttaaattttatgtggctaggtagtgcatgggtgcaagtagccacagacaccaaaagagggtctcagatcccctggtctacaaagtgggttccaggactgttacacagagaaaccctgtatcggaaaaacaaaacaaaacaaaacaaaaaaaaaaaaaaaaaaaaaaaaaaaaaaaaacccaaccaaccaactaaccaaccagccaacctgccaaaaataaaataaaataaaaaagacaagtatatattagcatgtaaaaatgtttatgataaaagcctagactaaaaggaactgctattacttttaattatatatatgcacatgtatatacatataactacatgtgcctttggaggccagaaaagggtggcctcctcttctgtagctgtggttaacagtgtgaacagcctggtgtgggttctggaaactgaaccaaagccatttgcaggagcagcaagctttcctagtcactgggccgtctctccagctccgagaataagtaatgtttcttaagtcctgcgctaagaagattctgactccaattgaactgatttctatctgttacagaggccactattgcctcagtcttggatgatactctctgccatgctttttccctcccaagattaaagaataatgcatgtaggctgggtggtggtggcaaatgtttttaatcccagcgctagggagaagggggcagtaaagccaggcagatctctgagttcgaggccagcctggtccacagagcaagttccaggacagccagggctacatggagaaatcttgtctcgaaccctcccccaaacagagtaattcatgtaaagccaaagccagcccattcataaggatgacattctgcatttcaagcatctaggctagaagttgttttttccccagtgctggaatcaaacccagggcttcacagtcagggacactcggagaaaccctatctcaaatatctcaaaaacaaatcccaggcccccatgtatgactggcaagtactgtaccaccgaactattcctccaacctagaaactctccgagagcagaagccattgtgtacttctgagccctaccgcctcctccagggctggcactgagctctgtacatgttggatcttgagggtgtgtgaagattgactgagggggaggggggtacatctctgaccttttgtactttttccacaacgttcctgattgcaggtgtcattcctaaatctttaagaaggtctccaggctcattctggcttgtgaaatttgagcttttctgttatgggtccttggaactccgaggccagccaactctgctgctcctctaggagatagacactgctgtgtatcccatgggatttggctgcacatgttaacagttttaaagtggatgtagttaatttttggttacctattcagaagagctgagtattctgcgcctcttaggtgccagagggacttctgtgcctggaacagacataaatggaaaccctgtctaggactcccatgaatgcaaagacctgttattctgaccattgttctcaaggagacatttttttggctgcacactcataactttggatcatgtgactccccacagacaaaagttggcttaatccaaccctggcctgatctgcacaactcaattgaaatgcttggctattcccagtgagatggctcaataggtaaaggcactcactgtcaagcctaatgacctgagttcagtctccccatgctggaggaagagaactgactcctgcatgttcttctctgacctatgcacatgtgtgttcattcacataagcacgcacacaatacaaaaaattaataaaaataattagggctgggaagtagtacagtggcagtgtttacttcccaaaaccatcacctctcccacaaacaaaacaaacagaaaaacttctgggtctttagatgaaggttacttgcctaaagtcacagttgcctgcctggtctaattgtgagttccaggcaaggtagggctacagagtgagaccctttctcaacaaacaacaaaaacaattctttctcccattattaagatcctaaaactcaggcaggaaggtggtggcatccactcttaatcccagcacaagggaggcagaagcagaggccaaaggatccctgtaaattcaaggccagcctagtctacaaaacaagttccaggacagccagggctgttacacagagaaactctgtctccaaaaaacaaaaagatcctaaaactttagggccagcgaggccagtgatagggctcatcaggtggtgagtgatgacctcagttcaatccccacaacacacctagagactggactctaagcttccctagggacccacaactcatgcatcaccaaaatcacactgacacacaaaatcaaaagattgtagaactctgattctagaatttctgagttggaaggggccttatttatggatttctttatgtttttgtgtgtatgtgtgtatgtatttatgtattgcatgcatgagttgcttctgcatcatggtgtacatgtagaggtcagaggacaacctggccattagattgtcaggctaggctgcaagcatctttacctgatgaaccatctcctgagaaaaataaagttgttttaaaaattaaaaagcagcatacactatccagaatgaaacaacggggaattaaggaggtcacctcatagtcagggctgagatactactcagtggtggagcgcttgcccatacataggaccttgggaggtggaggcaggaggagttcaaggccagcctgagctatatgtttaaacaacaagaacaacaacgccccctcccttccatcccaacttcacaatgataatctctattgatatttttacatcggggaactttatatgcttgtgcttataagttaaggacttgtaactttttgagatggggtcttattatgcagccctggttatccctgtgtagaccatacctggctagtcttagcaatcctcctgcctcagtcgcccaagtgtgtcactatatctggcttttttattttattttattttttttacagtgccaggtatcttgccacacgcaggtaatatgctatgcactaggagtatttaagaacattgcttctcagagatttgagctcaaaatttatatttttatttatttatctgcttgtttttgagaaagtgtgtagccttgacttacctgtaactcactttgtagactaggcaagtgtgaccttaggtaagtaacctcacctgagtttcagtgtcctcattttcactcaagggggtggcattgaggatccaatgagatgacatagggaaggcacttaacacagtgcctagcagccgggcgtttgtggtgcacgcctttaatcccagcactcaggaggcagaggtaggcggatctctgtgagttcgaggtcagcctggtctccagagcaagtgccaggataggctccaaaagctacacagagaaaccctgtctcgaaaaaccaaaaagcctagcatgctttggtgtcttgtaccatgggatgtgcccatgctaaacaaatgtgctagtcctttatttctcaattaaaattttaattatgtatatgtatggttatgggtatgtacatccgagtataagtacccatggaggccaggggattgaatcctggagctagagttacaggcagttgtgagctgcccaacatgatttctgggaactgaactctggtcctcttgcaaaactgttcatgtccttaatcactaagccccattttttttaatttttaaattacacctttgtttattttgtatgttaatgtgtgtatgatgtttatgtgtaagaatcactgtgcatgtgtggaggtcagaggacaacttgtgggagtcagtttcctccttccagcatgtgggcccaagggactgtgctcaggtagtaggcttaacagccagcacctttgcctactgagctgtctcatgggccctctgtcatcgtcgtgtttgtgtagcctccttggcatgattacaggcaagctctaccatgctaagttcactcattcttctagcaaatatttcctctttccttctggtccaggactggatgcagacaccagggcacagaatgacatgcaccagtgagggcgctcacattggtttgtgctgttgatgttcatcacagacatgcatgttgtccataggctctcacatcctagaaaaccctgatacgactctgtcatgtacctatgaatacatatttggagtgtggttcatgggagggactactgttagaaggaagggtttgtctgccattagaatctcactcctacccttccaagtcttctcgtgtcccattcactatatctgcttctcaaacccatgtcctcttcttctataattaaaattgtttatacacaaatgccctctatcaggcagctgatccctacagaaaactgactcggtttttttattaattaatttattttttatctgtgttttgcctgtgtgagggtgctggatcctggagttacagacagttgtgagctgccatgaaggtgctgggaattgaatctaggtcctctggaagagcagccagttctcttaacagctgagccatctctccagctccagaacttactccttcagtagccagtaactgcctgtagctcttcagtgggggtggggccttctgaacctttccccatccctgttgccatgtcaacttggtgtgtgctctaatcaggcaactgatcattgacagttcatggtcacagcatccctgtcatgtccagaagactctatctctgtagcaattcccttggtcctctggttcctacaatcttttcaccccctttttgttttcccttagccttaggttataggggttatgttacaagtgtcccatttgaggctgggcacatcaaagtcacttagtctctgcaccttgagcagctgtggttctctgaaatagcccctgaccatcacaaaaggaagattctttgatgagcattatgtgctgcacttagaaagcacacaagccagatggtggtggtgcacgcctttaatcccagcacttgggaagcagaggcaggcagatctctatgagttccaggacaggctccaaagctacagagaaatcctgtcttgaaaaaaaaaaatagtccctcactgtgttgcccacgatggctctggctctaaatgctcagatcgattttcttgttcagtctcatgagtttacgatttgttccaccctggccatctttttgtttatctttaaaagccataatctctgtattacatgtaactctcccactttcaataaagcacttagacttactttatgagtttttactgtgccttagtatttttttatttctatgtattttatgcatatgagtgctccacttgcacatatgcccacatgacacaagagggcaccagctcccattatagatggttgtgagccaccatgtggttgctgggaattgaactcaggacctctggaagagcagccagtgctctaaaccactgaaccatctctccagcccccaattcttagtattatttttcaatgaatgacagactcactactgtcactgtcagtatgttcagccaaactggaaaacgaacgaaagaaagaagggcattttccttgtaggtatccctccctcttctccctggcctggtctctaagggcccaggctagtcctggcatgagatctgcacacacaatgggcctctctaagcagcagacagaggcatattggctgccagcttacacccaggctctagtgacaaacatttccctgtggctgaaaaaagcctcagaagatttgtgcagatccctgacttagcagaaaaaaagctctaggagacatgctcgggtctccaactcagcccagggagggaggcctattggaaacacctagagttcactggtgacacctgtccttactggacattctcagggattctatatccaccaagccaccttgccaagttcacatccaaatgacagaccagccttccatggctcatccaagaagacttaggagtaggttggggaatggggaagttgcaaccagtgactgggctctcagggaaccttggccctggcaagcccctaagagccctggttccaaataggaaaaattgagtgcctaattcatacaaactcctcaaagtctcaaggaacaagggcaacccagcatccatctgtcctccaggcttttcaaatcactcctgcagtgcagacttgagcccagttcctcacccagcctgtggtgctgtcctgaaggaaactccccctttccatgagacagttggccagaagaccagctcaaaagagacttcggggctgggaacagagctcagtgatagataacctgcctagcctttaagttcagctctagcactcccaccaccacaaaacaacagggagctgggagagggagggagagaaaatgagagttcaagtaagaaaaactggaaagctgaacatagtgattaagacatacaacggtggctcacacctttaatcatagcactcagaaagcagaggcaggcagctctctctacagagtgagttccaggacacccagggctacacagagaaaccctgttttgaaaaaccaaaaggaggaggaggaaaaaaaaacaaaagacatacaatcctaatagctaagaggctagggcaaaaggtgggtaaattcatcagcctgagctaaacagtaagactctatcttaaaaaaacttttttaaggggctggagagatgactcgattaagagcactggctgttcttccagaggtcctgagttcaattcccagaaaccacatggtggctcacaaccatcccttatgagaaccagtgccctcttctggtgtgcagatatacatggaagcagaatgttgtatacataataaataaataaaatcttttttaaaaactttttaaaaagacatatatgatggtatatcctttaatgccagaagcttgggcatcttatgtctgtgagtacaagaccatcctggtcaacatgagacactgtctcaaaaaaaaaaaaaatccagtcatgggggctggaggggctagagtgagctctggcagttcagagctcatagtgctcttccagaagacccaagttcagtttcaagcacctatattgaacggtaactccagttctagggaatctgacacctctggcatccaaggtcacctgcactcacatacacaaacccatatacagacatacacataactaaagattgatgggggatgtccttctgtatatatatttctcttattggttgatgaataaaacactgattggcaagtagccaggcagtctgtataggtggggctacaagatgaggagaactctggggagaggtcacagagagaggttgcaagagagtctccatggagctgaggaaggagttaacaggtctggacccttctccggtaagaaaagaccatgtggaaatacttagattaatagaaatgggttaataattaagaaagagctagccaataagaagcctgagccattggccagtttataattattataagcctctgtgtgtttatttggggttcaaagagtctgtgggaacaagtgggacagaaactccatctacaaagctacagagaaaccctgtctcagaaaaaaaaaaattttaagaatccaggcatagtggcatagcttgtaatccccacattcaaaagatgatagcaggagaatcgggagttcaaagccagcctgggctacttgaaactacaacaaataagcaacacataaaatgaaggtgtgaggggagatgtttcaattaccttctttgttagtattcttttgtttgtttttgagacagtctcactatgtaggccttggctgatctgaactatgtataccaggctttccctcaaactcatggacattcacttgcctttttacctcggagtgctgggattaaagatatgtaccactatgcccagctgctattattcttttaataagtgtgtgtgtgtgtgtgtgtgtgtgtgtgtgtgtgtgtgtctttatctgtatgtaccacagataaatgtgaggttgtctgtggaggccagaagaggacattggatccctggagctggagttataggcagttgtgaaccactgacctggagactggcaactaaacttgggtcctctaaaagagcaataaataagtactcttaaccactgagcagtcttgtagggagacaccctagccccgtccaatagtcctgggacaggtaccaggtggacccggtacaattccccttttaccctagccccacccaatagtcccgggtccacctggtacctgtcccaggactattgggcggggctagggtgtctacctacacagtctctcagatccctccctaccttcccttaccagatccaggctctcctagccaaggatgaccttgaattttgatcttcctgtctccacctctcatcaaatgtcaatcattcatccttctcagaataatgtatgtgctatgataaaatattatcatcctaaagatgagagagtatagattaggaacaaggctctgataaaattttgccatctgccaggcgttggtggtgcatgcctttaatcccagcactcaggaggcagaggcaggtggatctctgtgagttcgagaccagcctggtctacaagagctagttccaggataggctccaaagccacagagaaaccctgtctcagaaaaaaaaaaattgccatctatagaactaaggttttgaacagtaatccaggtacagtggtatgtgtctttaattccagcacttgggagcaagaggcagacagatttctgtgagttcaatgccaatctggtctaaatataaaattccaggatagccagagtaaaacaaaaagaccctgtctcaaaatgaacaaacaaattaagagcttcaaatagcagaaactaaagaagccttagcatcaactgcaatgttatccacctgggtataagcagtcccaggtgcatgctcccactgccataaactcagccatatcttcctgccatatttttactttataccgtcaaaccataagtttaaaataaatcctataaatacaataaaatgtgacgtttcaattaatgcccattattttaaatcacgtcactggctataaccatcaaaacaataagatgtctgaagtggaaagtctctctcatatctataacatgtatgatcctatttgttgactgtgttgttaaatatgattgataggagctgggggatatatctcactggaggaatgctgcctggaagaccagaggccctgggaatatgacttttttttttctttttattaggtctattcatttttaatgtgtattttgactgtatgtggctatgtgtgccacttgcatgcctggtgcccccagaggtcagaagagggtgttgaatcccctggaactagagtttctggagtttcaggtggttgtaaaccattatgtgggtgcttggaatcaaactcaatcctccagaagaggagtaactgctgaaccatctctccattccaatttcttattcttattcttttttgagacaggatctcattttgtagttctagcttacctggacctccctatatagaccagactggccttgaactcacaaaggtcttcctgcctctgcatcctgagtgctgctgtgattaaagtagacctgaccttgattatattactcatgtaactgcttgatatacttttttttaaaaaagagatttatttatttgttatgtataaagtgttatgcctgcagcatatattcctgcagatcagaagagggcaccagatctcattatagatgtttgtgatccaccatgtggttactgggaattgaactcaagacctctggaagagcagcaagtgctcttaacctcagagccatctccccagccctgcttgatatacttttaaccttttaaggattaacattctagactgagaaacaaaacactatgcacaatgaaataaaatgtatcaataccagttgtagatgagcctaaaatatgaagaaaaataaaactgcatgggagttgaggtcttgaaccacaaacatggcaaaggtgagggtctagggcaataatagctcaatggttaagagtgggttaaaggaggaccagggtactatacacatacgtagtgcacagacatgcaggcaaggtactatacacaaacatacaggccagcaaacacccattcacatgagataaaaataagtctttgaaagtgtcaaaggtcacccaaggtcccaaagcctctctacttctgtggcgtcttggagacccctgtggggaaacttggcaggatttgagtctgggactgagctcagcagctttgctagccatggcactgtgtatcagcccccaccatctctcagttcccattctgggcaagaagccaaaaatacattcttcaggcccccacaggcgtttggagctgacagagtggagcttgaggaaagggctgagcaaagcagaaacctcctgagagtgtcaaaaggcagataacaaataaccacatcacggggcttatgcaacaatggagaaactgagacccagaaaaagtgagtgtctccaagaccacacatgaacaggttgtggagagagccacccaattaaggttctcctcaaagcacttctctggtcctcactggatgtgacgagtcactacatatctcaggatttgagggccacagatgataaaagaacctgaagttaaatgctccatcagccctttagcaaagaatctagttgtcctttcccagtccccattcttccctttcccttagcttcccaataggtgacaaatcctagtcacaacccagagagcccggagttatgtccccattttaagatgaaatcaaggttcttggaaatgaagtgatttgtccaagaccacactactagtgaatgagagacaagaaatacaaaccagtgctacttagctctgtgcttctccccccagggtgaccccaggtaggtgctgattctattttcatgcccacatcccatccctcaagaccaggctggagccacttggtgcctggggtaagcaggaaagaaattacaacagcccttcccagccctccggctctgttccctggtacttaccctccagcaccacctccttgcctgtcttcttgagggcctgtacggcttcatcatgggtggcagaggacaaatcttcaccattcacagacaggatggcatccccaacaaagagtgcctccgtctggtctgctgccagtcccttgaagatcttggaaatgagaataggcatcttgttttcccggccccctgcacaggcacagaaggaaggggaaactgaggcgtgtgcttcaaaatgggaaacttaccaaggtgaaattgattctgactcagtgctgggaaagggaaaatgagcaaatagtgagaaataaagggaggaaacttaggagtttgaccacagccagacttggtgacatgcagccacaattccaacatttaggaggctgaggcaggaatggagtgccttgagtgcagagtcactcagagatatagcaagacagacaaataatatattttctaaatccataatgctatattttggttcctagatcttctgtttaaatgttttgtttgttcaccacttcactgattttttaaatgttttggattttaagcaattttctacagtatgaaaatttactgataacccccatctagagtcaagggaaaagtagtggttgctatggcctgaagggacctcttctacaatcagcaagttttagaatccagagctgggtgtggtacacaaagcctgctatcccagcacttgggaagttaatgtggggaagggggtggggaaggccagaagttcagatcaacctcagctatgaagggagtttgaggccggcctgggatgtatacaaggccatctcaaaaataaatagttaaatgggctttactaaccaggattcacactggaaaggaaggccttaagttctagaaatttcaaaagtatatctgaatttcatctctgatctaagaaaataatacatttcactgaactactttattgttaaaatctcaaatgtcattttaaataattcaacatgtatttattttgtgtcttatgcgtgtatacaaatacacatgtcctatatagtacaatgtgggagtcagaggacaacttgcaggacttggttctctccaggaccatttgggtcctggagatcaatctggtctgcagtcttgagagaagacatctttaccctctgagccagtggttctcaaccactggatcacaacccctttgagggtcaaacgactctttcacaggggtggaatcagatagtctttatatcacatctttacattatggttcataacagtagcaaaattacagttatcttttgggggggttcaagacagggtttctttgtagctttggagcctgtcctggaactcactctgtagaccaggctggtctctaactcacagagattgcttgcctctgcctcccaaatgctaggattaaaggtgtgagccaccaccaccaccaggccaaaatgacagttatgaaatagcaacaaaaataattttaaggttgggggtcatcacaacatgaagaattatgttaaaaggtcaaagcattaggaaggttgaaaaccactgcttctgagtcatctcatcagcctcaaatgtcttttgcttgttttgtttgtggttttgtttgtttgagaaaggatcttactatgcagccccgactggcctggaactcactatgtctaacaggctagtctgaaacttggagagatctacctgcctctgcctctggagtgctaagattaaaggtatgcatcaccacacccagaccaaatgtctctttaaatagttagcggggctgggtatggtggtacatacttgtaatcgaagcaccgaggtgacaatgaataaaggattactgcaaattcaagaccaacttgttccacatatgaagtttcaggacagtataacagtctccaaaaaagaaaaatcaatgtcgactctatatagactcaagtcagaccctcagatatcacgttcctgatccaccctcaaagtactgaagaagagagactggtggcacagagcaagaggtcattgtttcaaggttatataaattggtgacatctgagcctggaacacctcactcccaacccccacccaggccaacagttgctcatggcactgcaaaaggcttgaggcctaggagaggaaggtgtttctatttatatccagcctctccacctaaatgtaaggccttccattccatttgaagctatgaccattcccagctgcctgggactcagctggaccccagaagggaagttaccatggcaacaggagcccagtcttcaatccaggaggaagtgaatgaaattccctaaagtcccaccaaaatatcctttcaatcacctggaagtacagatttgggtagtgtctctgtaccttggtaagaccctgctcctcgaagagttagtctgtctgtctgctctgacacaccaagtgtatttttttattgctgtttccctagcctataccagagtttgggattaaagctggtgcccactccctgttctcccgtttctcctttagactcttggggttcactacctgggaatttaccccttcctgggaagaactgactccctgggcagtctttagggcaataaaggctctataattaagattgaagtcctggttctgctgtacacagactgatcctgggaaagtcacttttcccttttgagtccttttagcactgatgctcaaaatgaagtagaccctgaactaagcataatgaacacagcgcctagcacacagtggcattcaccaccatgcccacttcctaacctgggccaaagtctagacaaggtatcaatgaatacagtcagctcccaggaggcctgggaatgtaccgacacattcagttttttaaaaaaggctggcagtctgttgagggctgaaactggtagacaaggcaagaatggtgaacccagaagttgaggatacacatggattttaagcaccagaagctgggggtgcacatggattttaaacaccagaagtcaggcccggtgttggtggtgcatgcctttaatcccagcacttgggaggcagaggcaggcggatctctgtgagttcgaggccagcctggtctccagagcgagtgccaggataggctccaaagctacacagagaaaccctgtctcgaaaaaccaaaaaaaaaaaaaacaaaaaaaaaaaaaacaccagaagtcagggatacacatggattttaagcaccagaagctggtgtgcccatggattttaagcaccacattcagctgatttgagagtccctcctggcctctcttcctctcatcacatgttggcaagccctgctctcagaaacatcctcatcatatagttaccaaaacagattcagagatagggagtgacttgaccaagttcacacagagatccagaactccggttgcagcctaagtgacctggggaagcagtcagttggtaaagtgcttgtctaacatgtataaagctctaggcttgatccccagcacaacataaacctattttagcctcacattccagtaatcccagcactctgggattacttcggtgttatcctttgctacgtagtgactatgaggccagcctgggatacaccagaccctgtcaaacagtcgttagtcttagaggcgaagaactctcaagaaggaatggcagctctggctcaccctttccccctgtccatggtacaaatggacagatgaggagactcaaacctagtcatcgagactcccagtctaggcatacaaccttctggagcccaagatatctaggttcttactggccaggccttcacctgtgcacttaggttgtgtctcagaacttcccccttcttgtcctagtagtgtcccttttcgccccgtcgtctgccttcctgaggatcctcatgcccttgatacctatagctaccattttgcttcaacacagaactacgaacccatgtccttggtgcgcccgcacacttccacacttgtgtctgctgagctccctgtaagatctccaactccccaagccccttccgaccttggtgttcctccttcctcactcctgttccttcctcccctcaagctctgctccagctcagacagcaggcttttggctatctagtctccttgctctgccaggccccgtgacccctgggcacttcgcagcagcatagacaccacgaccccatgccctcagtgccccccacctacccttgatgctgatgcccagcccgccggcnnnnnnnnnnnnnnnnnnnnnnnnnnnnnnnnnnnnnnnnnnnnnnnnnnnnnnnnnnnnnnnnnnnnnnnnnnnnnnnnnnnnnnnnnnnnnnnnnnnnnnnnnnnnnnnnnnnnnnnnnnnnnnnnnnnnnnnnnnnnnnnnnnnnnnnnnnnnnnnnnnnnnnnnnnnnnnnnnnnnnnnnnnnnnnnnnnnnnnnnnnnnnnnnnnnnnnnnnnnnnnnnnnnnnnnnnnnnnnnnnnnnnnnnnnnnnnnnnnnnnnnnnnnnnnnnnnnnnnnnnnnnnnnnnnnnnnnnnnnnnnnnnnnnnnnnnggcggtgccaaagggggcggggcccgggagagactgaagagatgctgctgggtaacctaaggatgctctgcgggaccgcttggagtgggtcggagccgcgtcgcggcgaggccacaaagttagaggaggcggttgaggtgtggagtactcagcggggacataaagggaccagattctgtggatgaggcaacccaaggatcgggttctgtgtgccgtcgaggactggaccgtagctcgtggagcagaaggacaagaaaaagaatcaaagatccctgggcgagactttgggagtctggacaggactgcgtgtggcggggagctaggctccagggacttggcagacagagttaactggtaagcgagctaaggaaggagatggtttccctcgttttgtgtgccatggggagaggactgtgggcgtggttcagcttcagggcacagtgtctaaagaggtaggcctgcccaccaggaggagaaacgccactcctttgagggcttgatcccagcacttataggtagaggcaggaggatctacaagttcaaggccagcctaggctacatgagaacctgccttaaaaatatacaaaataaaaaatgcgtaaggagctgaagagatagaaggtccatcggctaagagcatgcactgctcttattgaggaccagaataaagttcacatcatccatgttgggcagcacacaaccacttgtaattccaactccatggagatctgacaccactagcctccttgagaacctgtattcacattgcacacacccatacacggcacacaaaaataataaaaataaataaaaagacgtgtgttacatacacacatacatacttgaatgccatttattcagtgtttgcatgacatatgagctggctagtttacactatcatttgtacctcatttgtaaattctgcatagcctatacactattaccattttattgataaggaaactgagacagaagtactaagagcagacctctgtgctttttgtttgctagtttttgcttgttttcttgagccaggatttctctgtgtagctcccctgcctctgcctcctgagtgctgggattaaaggcatgtaccaccatgcccagttgctgacctgtgttctaacttgggtctttctggcttccaagttcatatcccctactccccttagcagcaagggatggttgcactattcactaattgatcactaactggaccaaacaagatgccatacacctgtaatcacagcactctgaagactgaggcagaaggttcatgagctaattctaggccagctagggattcatagcaagttccaggttatacatttttaagtttattttaattctatgcagattggtctttttgcctgtgtggatgtctgtgtgccacatgaagtcctcaaaggccagaagagggcatcagatccctggcacaggaattatagaccattctaagctatcttgtgaattgaactccagacgtttttgttaaagactgaaggacaagccaggcctactgaggaaggtctgcgatctcagatactcaggaagctgaagcaggatagtcacaagttcaaggccagcctgggcaatttagtgagactcttaaatgtttaaaatacaggacttggggtatatagctcagtggtagagcctatcatgtataaagccctacagtaaatctcaccactgtaaacacacacataagggggtaaggattacaagtctcatgcttgtagtcacaatactagggagatggagtcaggaaaatcaaaagttcaaaggctagggtagaggagatggcccagcagttaggagcactggctgttcttgcaaaggacttggatttgatttacaacacccatgtggtggctcacaaacatctataactctagttccaaggcatcttacaccctcttctatcttcaatgagtataggggcatatacaggcaaaacactcacatacagaaaaaaaaaaaaaaacatgttttgggttttgcactcataaacataaaaaaacatgttttgggttttgttttgtttttttgtgagttttttggttgttgttttgttttggggggttgttttgttttttgagacagagtttctctgtagctttgaagattgtcctagaatttgatctgtataccaggctggcctcgaactcacaaaacatccacctgttgtcatgtcagggtggccgagtggtctaaggcaccagactcaagttcagcttcctcaagagatctccctgtctctgcttcctgagtgctgggattaaagacgtgtgccatcaccgctcagctaaaaaacatgttttaaagttaaaattctgcatagtgagaccctgactcaaaaagaaaatagagagggagggagaaaggagagatggggagagagagcatacaagagtacatgagagagggcacagacccacacatcaccaagaactgaggtcctttcccaagaccaaggctagaattagatccttaaaagtccccccacgtagtgccctgtttaaagaagcttaatgaagtccagccaaacttctgggaaggaaccctaatagagagctcctcccctaggaaatgttctgaggacagagcttaggaaaggggaaatgggcatctgtataccaagcagctagctgagaagggagaaagtgtagagccagaaaaggggagaggtgtccatgattgaacagcatgagcagtgccaatcaccggcttctctgccagctgcctcatgaacatgtagctggaggaatactctataccccctcacttagtcagctgtggccagaaattgatcacacacacacacacacacacacacacacacactggcctggctatctaccaaacgcctgggcaaagctcccagagaaaaccagttcacagaagagataggagggggaacctagaaaaggacgaacacaagggaactgcccagcatttacacacacaaaagaaataaataaaattgaaaagtagggtagttttgcttaaggtcaggtgaaatcaatcagccctggtaacatatgaaggatctgctccctaaatgccaagatttatgctaaaatgctaacattcctttacactaaattctaaaatctacatttcagatactctagcatctgagatgtctgaatctagccaatatcctagagtagcccaggaaaaaggttaaaggctttggatccaggaatctgctgatttagctaggctcaataactcatctctataatcacagcactcagacggctgaacaagagtatcagtgcaggtttgaagccagcctaggttacatagtaaggtttgtttttgttttttgagacaggttttctgtgtgtagccctggctgtcctagaattcactatgtagaccaggctggcctcaaaatcagagattcacctgcctcccaagtgctgggattaaaggtgtatgccactatgccccacaagtaaatcttgtcttaaaaacacataggcccagccatgcagtggtggtgcacacctttaatcccaacacttgggaggcagagacagctggatctctgtgagtttgaggccagcctggtctacagagcgagttccattgagttccaagacaggctccaaagctacagagaaaacttgtcttgaaaaaacaaaaagaaacaaaaaacaaaaaaccctaataggccaggcagtgatggtgcatgcttttaatctcagtgccccagaggcagaagcaggagagctctgtgagttcgagaggccagcctggtctgcagagtgagttccatgacagtcaagactacacagagaaaccctatctaaaaaaccaaaaacaaaacaaaaaacaaaaaacaaaaaaaacagaaagtgggcaggcaagattgctcactggggccaagcagtaatggctcatgcttttttttttttttttttttttttggttttttgggttttttttgtttggtttttttgagacagggtttggagcctgtcctggaacttgctctgtaggctaggctggtatctgaatcacagagatccgcctgcctctgcctcccaagtgctgggattaaaagcgtgcgccaccaatgcccagcttttatttttttttaataaaaacaatctcacagcatttattgtcacctgataataacataagggccactaaaacaatatgaataaatgtttcagactgtgctccaagcagaagaaacctttaaaaacattgtacttcctcttcagcttctcgagtgcctgagtttatagtcggaaacactttggagcagagtaatattgtctcctttcagcatgatccaatccagttgcttccttgactttgttttagagtggatctctctgtatcatctaatatgaggttcatatactcatcaaagccagtaaaacaaccctctatccacatattcgcttgctcatatagccacacctgaatccgagacctaatttgcaaatatttgaagatgagtttgatgggctgcaccgtctgaccctggccgcagtatgccatagtggaagtcacaaagaccacacgagtaggctgcctcagaaagcgacttccagaagtaagaccaggaaaaaccgtgtctcctgcagttaataccagaatcttggaggcagatttctgagttcgaggctagccttatctacagagcaagatccaggacagccagggcaacgaagagaaaccctgttgttgaaaacaaacaacaaaaaagattgttcaatggttggaaagacttttgtataggcctgatgacctgaattcaatcgtccacaaggtggcagaagagaacctacttctggaactcacacgaatacctgcgcacaataaattgtttttaagtttaaaaaaaaaaaaaaaaaagctggcaagctgtgtaaagaaacttgttatacaatcttggtgtcctgagttccattccccagcacccacataatggtggaaagagagaacttcacagaattgtcttctgatctgcacacatgtgtcatggtacatactcccatacccacatatgcatatcatgtatacatgctcacacgcgagagcacacacacacacacacacacacacacacacacacacacacacccacaaggaagagaaaaagacaagacagaaacaactttaagtggggctggagagatgacccaaagttaagaacactggttactcttccagaggacccaggtccccagaattcacatagcagctaacaaccatccggttccagggaatctgacaccctattctggcttctgtaggcaccaggaattcatgtggcacacagacattctgaaggcaaaaactccctgcaaataaaaatgaataaatcttgccgggcgttggtggcacacacctttaatcccagcactggggaggcaggggcaggcagatctctgtgagttcgaggccagcctggtctccagagcgagtgccaggctaggctccaaagctacacagagaaaccctgtctcaaaaaaaaaacaaaaaaagaataaatcttttattgtaaaaataaaaggaaccgggcagtgatggtgaaagcctttaatcccagcattcaggaggcacagacaggtggatctctgtgattttgaagccagccttcaaagcaagttccaggaaagccaggactgttccacagagaaaccctgtctcgaagaaagagaagaagaagaagaagaagaagaagaagaagaagaagaagaagaagaagaagaagaagagagatcaggtgttatgacatgtgcttttattcctgttaaatttcaaatggctttggccagtacaaatggctgaggtgcccacttaacatatcaaaacgaacctggccaagctcaatctagtcatgtccactccgcactctcccagatgtccctgtctctacctctgctctcccatatatctataataaactttttcctccactgtacctcagagcagtcatggcctttcctttcctttttatttatttattttttttcattcaattccaagaactcttgaatcagaggtcagcctgtctacatagtgaaacccaggctagccaggacctcaaggtaaaacactatctcaacaacaacaataaaacaaggcatggtggtacatgcttttaatcctagcacttgggaaatgggggcaggcagatctctaagttttgaggttagcctggtctagaaatcaagccagggatatacagaaaaaccctggggggcggggagtaagacaaggggttgggggtaggggagaaaccaaaatatccgacaggtcctccctgtgttctgatctggaattccagcctgtgcaaggtaagtgaacagttgttcaaagagcaagtgaagacaagaaagcagcagatcaggctaatgagatctttggaatgattctaaagctaaaatgacaaatgatagaatcgcaatgcagttggaagactattcacacaagccaataaaggagaatggataaaatgcagacctgacatttcctaccaagtgttctctcctttttcttctcaattttgtttttgttttgaaatggggtttctctgtatagccctggctgtcctggaactcactctgtagtgtaggcaagcactcatatacataaaaataaaagtctcaaaaaaaatttagtgcttctgcctggtgtgataacatacacctttatttccaggaaccagaggcagacacaggcaaatctctgccagtttgagacaccagtctacctatatgttgagttccagtccagccaaagctacatttaatgcagggggaaaatgcttctaatatatatgtgatattggtgaggccatccaagaaggtgtagaaccctgttaagtagaaataaatggaagacatgtcaagtgaatacaacctacaatctaaatagacattcgattgtgtgatatagaatacatgttgggcaggccagcgaaatggcttagtgggtaagggcaactgccatcaaacttgatgacctgaggttgatcctgaagacacacatggcagaaagaaagaacccacccttctgacttccgtggaggaaccatcacagaagagcacacacatacacagacacacagacacataaaaaaatataatgaagaagctgggtgttggtggaacacactttaatcccagcactcaggaggtagaggcaggtggatctctgtgaattcgaggccatcctggtctccagagcgaatgccaggacaggctccaaagctacacagagaaacggtatccatgtgagagaagggacaaaagagaaagcgagaggaatgaggaagaagtatatgacattaaaactcttagtagcacaagaaaaagcaggctcccttcatgatgatatggagcattcataatacataaaatattttattgttgggcatcagtcaataagccttctaagaacaaaacacttgttaatattaccagtaaatactctggcactcttgccttctactgcagatggttagattgacaggttcatgactctcaagaatctgactaggtctactatcctatgttccagactaatcagggtttcacatggagaccttgtctcaaaagggaaaaaaaagcagacaagccagtcatgtaagtttatatatgatataattttataagtttaattaatcgaagttagctcaaagtcacctcagcatctttattttctaaacattgtgggaaaacgtaccagaaggaatttgcaacactttatctgttttaacataatggactgtgcaatagttttatctaagtttaaaggtttcatcaaaggcaactgtctttggcacaggtagtactgggaagtgtcagtgatatttaagttggttttcacaatgctcaggtagtgaggaacaaaaccttttagagaatgaagcagacaaagcctgccagggtaaagaatccacgttttttatggagtcaatggaagccaggaaggtattcatgattcaggttctcttttttgtttgtttgtttgtttgtttgtttctttttcgagacaggatgattcaggttcttgatctgagcaatttcagttacagtgcaacacttcaaccagctctgcctgtcctgccagcccacaagcagtcactggggaaaggccctgtttagggatccagacagactaatgctgaattcagcccacacagatcctgcctccactctccatcccaaaataccagctgggcaccgcagcctgagtatcattttcctcaaccctttttctaattaaaacttttgtcttgggggtggagattccagcagggggcagcagactgccagggctgcggggtccaggcagggtcctagccaccatctagctcaactaagtaacaaatggaaaagaagtgggtttctccttcctccttttttctcttccacctcttccttgtctccccctcccccttttgtttctttcacacaggagctaccagcataacccgagttagcctcaagctgtaaatattccttccttaggctcccaagttttggaatcacagaccaaagacatcttacctgttctgtttggttgcttctttaaccttttttcttttttttctgagacagagtctgactgtgtacttctgactaacatggaactcactgtgtaggcaggctagcctggaactcacagaaatctacctgcctctgcctcccaagtgccagaattaaaggcatttggggggggggtgagagaggttgtgtatgctatgtctatgtgggtgccctcggaggccagaagggggtgtcagatctggagctggagttatgggtggttgtgagccacctgaatgggtgctgggaaccaaactcacatcttctgagagacacctgactcagattgtcactatttatctatttactctttcattaatttgctatttacttagtggccctgaagattgaatccagagccttgcacattttaggcaagggctatggaaataattactatttttgttgtttgattgggtttttgtttgttttattatttcttgcgagtgtatgaatgttttgcctgaatgtatatctgtttgccacatgtgtgcctggtgcctgtggaggtcagaagaggtcctcagatcccctagaacttgagttgcagatggttgtgagctattttgtaggttctgggaatcaaccttggtcctctgcaagggcagtaagtgctcttaactactgaaccatctctccagcccctagtctgttttttgaaacatggtttctttgtgtatccctggctttcttagaacttgctttatagagcaggctggcctggaaaccagagatctgctggtctctaactttctattaaaggcaaacactgctaccaccaaggtatttgtttttgagacacagtctcattctgtagccccatccaactatatcacccaacctcgtctcaaacttgttgcaatctccatgccttgactcttgggcactgaaattacagctcaggtctgctgaggttttgaagcactttcttctgttctccatgtgaggaaaccacatccgtctaatctatcaccctcctcattattattatcatcatcactctgtcaaccacacgtttttagacaatcctatccctatttcccctccagagcgtggactggagcggtaggaaaagaaccaataccgagagagcaagttgactaggactatagccctagctttccattgacatagtgtgtgacctcagtcagaacattcatcctcttatttccactttacacatctgtagaaagatgggaatatgaaaatgaaaggttgcctggcagtggtggcgcacgcctttaatcccagcactcaggaggcagaggcaggtggatctctgagttcaaggccagtctagtctacagagtgagttccaggacagccagggctacacaaagaaacaaaacaaaaacaaaaacaaaaaaagaaaattaaaggtgggcaaggcatggtgaaacctgcctttattcccagcttctggaaggcagagacaggtggatgtctataaataaaggccagtctaatctacatagcaagtccagtccagccagggctacataatgaggccttgtttcaaagggagtggggggggggcatggaggtctggaaagatgtctcagaggttaagagtgcatactgctctagcagagaacctacattcgttttcagctgccatactggatggttcacaaccacctgaactccagctccaagggaaatctcattcctccagcctccaaaggcacctacactcatatgcacataattacggggctggagagatggctctgtggtaaagagcactgactgctcttccagaggacctgggttcaattcccagcacccacatggcagctcacaactgtctataatttcagttccaggggacccaacgcccatggcaaagcaccaatgcacataaaataaaaattaaaaaattaaataaataaatctcaaaaaaataaagaaaaggtaggccagtgagtcagtgagtaaaagcacttgactccaaacctgaagttcaatctccagaacccatggtagaaagacagagctagcacccaagggctgtcttctgacctgcacctgcacactgtgaaacatggacatctctactcatgcatgaccatcaagcatatctacactgtaataataaataaaacttagataagaaaagaaagaaggaaggaaagaaagaaagagaggaggaaagaaagaaagaaggaaagaaagaaagggctagaggacactaggaagaattgagttgggtctgtgtaagtacctggcatatgaagaagcttccatacattttaattcctgctaagtgtactggttcacatctataatcccagcacttgagaggctggggcaagaggagtagcatgcactccaggttagcctggtctacataatgagttccagaacaatccaggctacagaatgagaacctatctcaaaaaaagttaaatgaaattgggcagtgaggtcactcactcagtgggtaaaacccctagcaacagcctgtgcactatcctcagaaacaccatgaaaggagagaatttgagcacggcggtggtggcatactcctttaattccagccctcggcaggcagaggcagacaggtctctgtaagttcgagactagcctggtgtacagggcaagcatttttctttttgttttgttttgttttttcgatagagggtttctctgtatagctttggagcctgtcctggacctcgctttgtagaccagggtagcctctaactcacagagatccactgcctttgcctcccaagtgctgggattaaaggcatgtgccaccacaagctggcttcagcaagcattttttaacacctttttaaaaaattattttttatttttatttctgtgcactggtgtcttgcctgcatgtatgtttgtgtgagggtgccagattctctggaactggagttacagacagttgtgggtgctgtgaattggacctgggtctcctggaagggcagccagtgctcataatcactgagccatctctcggccccattttgttccaacactcaggagacagagacgatggatctcggtgaatttgaggccagcttagtctacatacccagtttcaggctagccagagctacatggggagaccctgtctcagaaagagaggatgaagggagcaaaggactattctttggcttcagaattttcctttaacactggaatttactgctttgcaccagccaaagtcagggggttcccaaggcctggaaaaccctgcccctgtttccacgcacagttctccctttctgtggtcctccacccacccatgtgcttcatcgcgccacccttcatccagaacaactcgttttctttttctcacagatgttccacaggctctttttcctcagaaattccctcaaaagcattcactggtaatttttctaaaatcacagtaattacctcattactttgatattaatagacctcacttggcaccagggtgccaattgaaagcgctcaggccctgtgtgaggggtggagagggagcctgaagagcagccctcctgaatgctggccctgggacagcccttgtttgcctccatcccaagttgtccttcacctttgctcccaggtgttctgatttcaaaagagaatcctggatccacaggctcctgagaaatgttagctgcctgaccaggaaaaaggaagataaaaagaaatgatggaagctaaaccatggactcccccgaggcctcaagtctcacagaggaaaggcagatggtgagaggccaccctagaccacctttcccctttccttccctcagctacacctaaggctttagcctgaaggactctctccagttacacctcccccaggacctctactggcttccctacagctctgtaatccagtgtggtctctacatctcctggtcaataatttatttgatcctcactatattcttattattttttaataatatgtaggccttgtatttcaaaatgcatcttgaataaaatggggcaactgtattacggttaataactaatacgtagcccataatggtcaggatatatttttattagatagccaaccagcaggcagaacaagccaaaacagcagggaaaagagagctcccatgtgcgttccctatctctttaaacctttaccatgtcaacctgacatcaccttgaccacaccctggtgggtgtggtcgggcacacctgtagccagcccttaggaggcgtggttacggtgtctccctacataactgtcatcatttaaccattttagataaggaaagaacataagcttgtaactgaggactactcagggttctgggcctgcacctgacagctacagaagccctgggacttctctctcctcacctggagtctctagtagctctagtggatttaatctgcatgtattgagtgttccgtcaggttacctgggttatgctattgagatttgtcaggtgatttgttccagagtgcgctctcgatagctgatagctcagactgctaagcttatactcttcaccttgacactctcctgcgagcatctccctctcaaggtcatccagagcagtctctgagactgctgatacaggcttgctgaaagtcaggactgaccagtttgccacaacccctacctgattgactgtactacctgactcattgcatcggagtctgcaaaccggttgtgaccatatggctgaccacgctatgctggccacatttgtccatcctcaggttggtagatatgttttccaagtccaaggctctccagcacacttcctgggaagtttcctctgtaaacagaatgggaagagtgatagtctcaacagaaatccaggacagagagtgattgggcagccagactagactggagctagtgggtgggagaggggcagtatagaggatcctttgttaggccagaagctactaagctgccccatccccaccatctggctcctgctgcagcccagtgatgcatgatggggaatattgggggcgggtgctaggggctacccacctgctctgcctcctgggataagctgatccaagacctcccagacccatctggtcaacacatccccaggccctgaccacccctgggactcctttagacagactgaaattggccgggagtgtggccagcctgtcagggtcacaggtcaccgttaatctgccagaacaagggaggacaggcaggtgggcaggcaggcggtgtgggcgaggccatgggagttcctgctgtcttcctagtgaccacagagggagggtttccccttctgggaggcagggagaaggttattggactccagggaaattgctcattctcacacctagctgttctagttccagatgggaaccctggaaactctccttaaatatgcttagggcatcatggaaactatgcatgagacagagaaatactggggaaaatgtaagtgcccatcaacaggaactgggttaatctaaagactgagaccaacttcagtgttactgaacttcttgggctgagaactgaggtccctgtctcaattgtctctaggaatctcttgcctggaaagataagactataaaccaacagataacctcactgtttgtctcagagagttcctgcaaaccaatttctttgggcaaacagtttgttcaacttggccaaaatctctcttgtcagacaacagtttaacctcaatcttatatttttggttgtaagcctagcctttaattgctgaggtattccttcagcccttaacttcaatattttaggagcataaaaatgggcttatactcaggattccacctggcctcaggcttgcaacacccagcttctccttcccagtccagcctgcagtctgcagccccagcactaagctcttctccaagcttcttaccagtctgagcatgtgtggaaccctccattctgtggatcagtaagtagctcaacatcaaactagcttacatctgagtcacagtgtctcatgttatcatgaaaaccaacttcatcagggactcaggggtccctctgtacaattgtagtgtgctaggaggacacacaactgcacctgcctttctcatttcttccctggaaatagtggaagtttcctagatcattcctaggctatttgggagatgaaagaactctatcccccattggaaacaagatctatctatctttgtatctatctatctatctatctatctatctatctatctatctatctgggtttgtttgtttgtttgtttgtttgagacaacgtgtctctgttgtgatttaagaaaagcagaatgagagagaaagatgtcatgagacttgcttcaagcagaggggttttttattagggaaagggatcataaaaaaatggggaaaggggagggaggagactggcctcctgggatgggagcagcaggaaagaggaaatggggggagagagaaaaaagagagatgagggaaaggggggatgggaggtgggcaaggcccctttaaaagggaacatagtaaatatgcacagatgacgctcttagtggctgtagctaagggtttatcctgtcaaaaccccaaggacaggccagtagagatgcctgaatactaacagtctctacattgccctggctgtcctggaacctgccatgtaggtcagactggccttgaactcacagagacccacctgcctctgcctccaaagtgttgggattaaaggtgcgggacacacacgacaaaaagaaaatttatgattttttttaaagagacacttcttgatggacatgggtggtacactcctttaatcccagcacttgggaggcataggcaagcagatcttggtgagttcaaggccagcctggtctacaaagttccagggcagccaatgtaacacagagaaaacctgtctggggggggtccacttttcagatatttactagtcccaaactgttatatcacaaattttgcccaatcccaatctgttttctgccttaagaggagctggactggtggttcatgagttaagatgtactgctcttgtaaaggacccgggttctagtaccaacagcacatgttggatcaaaactataactagttccaggggatccaacaccttcccctggcttaaatgggcaccagacacacatagtacacaagcatacattcagacaaacactcataaacaaaaacgtaagggggaaaatggtggtacacacctgcaatcctatcctttgagaggtagaggcaagagaatcaggaatttatggctaacctcaactaacataatgaattcatgggactcatctcatgaaaagaaaaaaaaatgagacgggtaaagtggtttacatttgtaattctagcactgaaacagtaggattgctgagatgagagttagggagggttacacaagatcctgttttaaaacaacaaaactcactggatcctctttctttgtgagtattcttctttggagccttctgaggcacttctgagactccctcaagaacctgcactctggtcagggctcagcagtttacccctgatccaacttggtgtatcactgagctacaccatccctcattctattttaaattaatctattgagacacagactctcgtagcataaactttgatctcagtatgtagtcaaggatgaacttgaatttctgatctttcttgccttatctctgagtaattagttacaggtgtgtaccaccatactcaagtgggcttattttattgtgatttcgaaaaatttgtgtgtgtgtgagagagagagagagagagagagaaagaaagtgtgtgtgtgtgagagagagagtgtgtgtgtatatgtgtgtgtgagagtgtgtgtatgtgtgtgtgtgtgtgtgaaagagtgtgtgtgagagtgtgtgtgtgtgtgtgtgtgtcagagagagaggagggggagagagagagagagagagagagagagagagagtgtgtgtatgtgtgtgcagttgcccagagaggccagaagagggtgtcagattatctggagctggagttgcaagcagttgtgagctgcccgatacagggctgagaaccaaagtggaagagcaacagctgaaccatctctctatagtgtccaggctgctttgctgagacaggctctcatgtagttcaggctggccttgaacttctaatcttgatgttttctaggtaagttttctggttgattagaattccaagacttcaaagttttctcagttaaaatttcacaactagatgctgcctgcctttcatcccagcacttgaagtcaggagagttcgaggccagactggtctactaagcgagttccaggacagcctccaaaactacagagaaaccctgtctcaaaaccaacccccgcaaaacaaaatttttacaactaaagaagctcttgattagaattttatggcactggagaaattgtgattaacattctatcaccagacctttttttttttcccttttcctttttttccaagacagggtttctctgtatctcaacagccctagctgtccttgaacttgctctgtgttctgttgaccaggctggcctcaaactcacagagatctgcctgcctctgtctcctgcatgctgggatcaaaggtgtgcacttgctcggcccatcaccagacttttattactgaaaatttcatgacttgagagctctactgttttgaatgtagtggtatcttagtgcttcagcagtgcaggcttctccgccaagatggcttggatctctgtgctctatcactttccttggaaggcctttcctgagctatttctgtctacctgccatctgctttaattttctccatgctgttgataaacacttaaaaaaaaatagcacctggctattctactacaatgcaagaagctccattagggcagaaacttattttggaatttcttttgttttttgagactgtctcatataactcagtaggatgacgtttgtttaattgttcatcctgcctctctctactttatgttccaccatgtccagtttatttggtgctgggaatagaacccagagctacctggaagttcctcatctttccagatttccaattttaccattactttctccagaaagctctcctgagtggccagatttatttgcctccattgtcaaaaatagtttaagttcttgtactgttattcataaaactctgtactattctatctatttaaaatagatacagctgggtggtggtggcacaggcctttagtcctagcacttaggaggcagaggcagtcggatctctgtgagtttgataacagcctggtctacagagctagttccaggtcagtcagagaaatcctgtctcaaaaaccacctccccgcccccccaaaagatagatgctatctgatagtctgtgtccctgccccaatctctttttgtgacagggtctcactatgtaaccctggctaaactggaactaaatatgtagaccaggctggcctcaaactcctgtctttgcctcctgagtgttgagacgaaaggcaccaccactaactagcaactggctgattctttgatacttgcagaaagaccatttactttatatctcctgcctagaccagtgcttggcacccagtagcaaaataccatattacactcctgcaatcagaacgaaaaaagaccctctagggctaaatgccatcaagaatcagaggatgcaagaaggaaccaagactttggttcacaagctcccttctgaagaaggcagctatataagggtgaacaaactactttttgttttaaaaaatatttattcttttacatatatgaatgtttgctacatgcatgtgtgtgtactattgtgagcctcgtacccatggaggtcagaaggcactggattccctggaactggaattacagaaggttatgagctgccatgtgggtgctagaaatcgaacccaggtcctctgtaagagcagcaatggctctcactccttaaacttattattgttttgttgttgctgttttgagacagggtctcactatgtaactggctatcctggagctaactatgtagaccaggctagcctcgaactcacagagatctgcctgccattgtaatgtaactgtaatttcttaactatgatataacaaagtcactcatcatgaagggcctccaggtccacttcaatttctttttcttccttctccttcttctttctttcttttcttcttcttcttcttcttcttcttcttcttcttcttcttcttctcttctttctccccccaccccagtccaaacaaggtttctctgtgtagctctgtctgtcctgggaccagaagggcctcaaactcacagagatctgcctgcttctgcctcccaaatgctagtgctgggattagaggcgtgcatcaccactacctagctaaaactttttcattttttaaaagattcatttatttattgtgcatagagtgttctgccagcatgtatgagggcatcagatctcattatagatggttgtgaaccaccatgtgggtgctgggaattgaactcagggcctctggaagagcaaccagtgctcttaacctctgagccatctctccagcccctaaaactactttttcttttcttctttttttctttggtctttggagacagggtttctctgtagctttgtagaccaggctggccctgaactcacagagatccccctgcctctgcctcaccagtgctgggattaaaggcatgcgccaccactgccttaaaacttttttgttaacacattaaaaaacaaggtgtgcgctgggaagtggtggcacatgcctttagtcccagcactcaggaggcagagacaggtggatctctgtgagtttgagaccaccctggtttacaagagctagttccaggacagcctccaaagccacagagaaaccctgttttgaagcaacaacaacaaaaataagctgtgccagccatgtggtttgtggccccctctgtatcacaactggcaggtgtacatgtgagccacagacagtacctggaacttgttcaagtaaacttcttatactggtttgacttttacttaactctcccagggacaaaaagatctggggactctgcaatgcagataaagctttaggaaatgtgagggtctcagatggacaagaaacacttttttctcccccacttcagtggtgctgggaagtcccttaactgttcagagcctggggctcctcctttgcaaacgggctacaataaaagatcttggctcccaaagcgatcatgaggattaactgagacaagccttcaactccaaccaggggggctctgcattacacaccggattgctattgttgataatgattattattactatgaccagcgggactttgggagtagcaaatggaaggaccatatgcaaatcctccagcgcaatgtctgttacactggagaccttcacaaaggctcataactgcctgttttacaccctcatcacccccacatcccaggtcatttcacataggctttcccagcatcctttatgctcccccccccccgcccccaatcccattgcaagatctcgccacacaagcctcagcagagaccagagaaagtgcccacggcagctggccagggtccgggagaggacccggcgccaagggaggcaggttccgggcagacccctgtccattgtctcaacccgccagcccgccagccagctgatgtcttgggtcgccgacaccagctggttaggccccacaccacctctgaaaggcctcctcctccctggaccctccctgtctctcatcttgcccagtagcccagagagaatcctagtgtgattacagggcctgggcttttgtccctcaaatcagtgactgatttgcattctttggcaatttgcatagcccattcttttgtggagggctaggctgatgtagagcccgcccagtcctttgcgtttgtttattccggtaattctatttttgtagccctggctgctttggaactcactatgcaactcctgcctctgcctccagttatctgtgttaacagggcgtgctgtccaatactgagccactaggcaacttggccattaaaatttaagtaattttagtactttggtgcctcagttataggcatcaaacacatatataggactttttttttgggggggggggtcagggtcttaatataatccaggctggctttgacctttgctatgcagtcaaggctgactttgaactcctgaccctccttcctcttctactacttgggagtgatgagattacaggctttcaccacagtacctggttttatggcatactggagacagccagagcttgaagcaagcattgtaccaagtgagctctatctctggcctggcagccacatattaaatgctcaggaggggctgggagtgtagctgtgttgaagcatttgaatacatctataggccctgaattccactgtcactgccacacacacaaaaagagagactgctgggcatggcaggacacatctgcaatctcagccctcgggaggcaagaggatggtcacatgtcgagaccagagtgttatgcatagttccaggccatccaggactaaatagtgaggcccatctaaaaataaagaaaccaaacctatagggactctcaaactaagcagtgtgggtataaatcatccatctctgaaagttctgctggatgaggctgattcaaaccctttaatctgactcatttctctttctagtcgagaggtcttccttctacagctcctctccctacccccaacaaggtaatgaccttggtgagtaggtgttcttttgttctccgaagcgcaggcttgcacctggacagagggtggagaacaggtgtggagttgtgccctggagcaccaatggggtgggctcaattgttgttcttacaaagcaaacaactgcactcagctctgtctttggcctcagctggagcctccattgcctggaggtgaattagggaggaaaggcttagggaactgtgaaccctgtccccaccaccactcaccggcactttaaggtcactcctccccctggatgagtggtttccagcacagctgacacctggggaaggtgtgccagatggaatgcgctctgaggagcggggatgggggaggactggcaatctgccaatggctaaggcccagctgcagcacaagctgtggaaggcatgtgcaggtcttctctagcctatttcaggttataggtatcccacatgcactgtggcgccacctcacttctggagaggagcaagggtttagcaaccacaacagtaacatctttcatagccatgtggccatctcttgccatcccaaagtgtatacccacgcctaaactctgcttctgctagtcctctagctagtcccatctcagcagacggctactccgtgcttccagatattccaggcttcaaatcttttattttgttttgtttgagacggggtctcactatagttttggctggcctcaaacacactgtacctctcctgcctcgtgagaggtgagccactatacccagttactattctggtgtaccacatataaatccttggcaaattctgctgcctctaccttcaaaatatatctaaaatccactcccttttcaaatctccactgccgccatcctgctttgagcattactgtagcaacattccacctttgccttctccagtatacttctctcccatagaggtcaagatctcaaaactatctggtggctgcaacaatgacttagaataaaaccaaagtccttactagggtgcaataagtcccacataatctatagtccccttctaagtctctggccctttaccaatttccattgtgttctatgaatgttcctgcctcagggcctttatttccttctactctctccaaatttggcatctctgttaccttcttcaggtttcagtggtataaatgtcacctccttagaaaagtcttagcctggtagtggtggcacacacctttaatcccagcactcaggaggcagaggcaggtggatctctgtgagtttgagaccagcctggtccacagagtgagttccaggacagtcaggggtacaaagaaaaacgttgtctagaaaaacaaaaagactttctttgctatctttatataaaatcatacctgaaacacaacctttgcctccctcccacctgctcttcagacgagtgctgttactttttgtggtttcaaggattgagcacgagttccttatgacccctaggcaagctttctaaccctagactatttctgcaggctctaatttgcctagtagtctaggttttctttagttctcctgattattggcaaatacagaattttccaatctttattattaattattattattattatctggttggttttttgtttgttttgagacagggtctctctacataaccctggcagtattagaactcattgtgttgaccaggctgcccttaaactgacagagatctgcctgcctctgcctaacaagtgatggacttaatttaaagacaaggacaaccaatcctggtccaatcttaattattgacgataattttcagatcttatactacacccgaggattagattacagaatgaccaacaatgggtttaagaggccacagggttcagaggtgctttactgacagtagaaggcagggagcagatagatgctaggagagttatggtatgtgcttagattaatattacaactaatgggggctggagagaggcttcagtggttaagagcactggctgctcttccagaggacctgagttcaattcccagcaaccacatggtggctcacaaccatctgtaatgagatctggggcccacttctggcctgcaaggaatacatagatgcagaacactgtatacataataataaagaaataaaaaaaattataacaactgatattgccacagttccagcatgggctgttgaagatctgggtgcttccagatgctaaattgagtgggttgggggagtgtttcacatctgtaattccagtatttgagagacagagccaaatgcatcaaattctaggccagcctgctggattatatagttactacctggccagacacaactggtagattctgtcttaaagaaaaataatgagatggtgtggtggtaaagtggtagtgggggtggagagtgagttctaggcttactaggtttccagaaaagataacttgagctggctttgtccagcagtccatgtaagctaatacccttggggctctggggacagtcaggaacttgcttgtggatagttcgatgatgggtgaagtcttagtcaatgttaggacccctcctattgtatgatccaggtgaaggagttgttcattctttggtctggtgtggttgataactttgtgggcctggtttctctgatatagttcccatatatctatgtgtacaaatgtttctgattaaatttgataaagcctatcaaattaagtggtagatagagcaaggacatcctgatctatttcttcccttccttccttccttccttccttccttccttccttccttccttctttctttctttctttctttctttctttctttctttctgtttttcgagacagggtttttctacagctttggagcctgtcctggaactctctctgtttaccaggctggtctggaactcacagagatcctcctgtctctgactcccaagtgttgggattaaaggcatgcaccaccacttctcagcatgatctctattttacatgtggtattgcaactttgcaataccagcactcaagaggctaaggcataaggattaaaaacttaagcctagggctggagagttggctttgtggttaagagcactaactgttcttccagaggacctgggttcaattctcagcacccacatggtggctcacaactgtctcacaactccagttctaggggaccaaaacatcaatgcacataaaataaaaataagtgaattatttaaaaagtcgagtttagtcaggcagtggtggtatatgcctttaatctcagcactcaggaggcagaggcaggcagacctctgtgagttgagaccagcctggtctacaagagctagttccaggacagcctcctaagccacagagaaaccctgtcttgaaaaaccaaaaaaggaaagaaagaaaaaaaaaagtagagtttaagcctagactgaactatgaaatgagactgaagtcagcagcagctatataatgaaactgtctcaagatgaaaacagaaaaaattggggaggcgaggattttgaaacagggtttctttgtggctttggaggctgtcctgggactagctcttgtagaccaggctggtcttgaactcacagagatctacctatgtctgcctcccaagtgctggaactaaaggcatgcaccaccactgcctggctatagtcttaaccattgagccttctctttattcccaagatcaaaaatttaaaaaaaattttttaagtgcttcattttcttcataatcttgttgagtttttgtcttaatttggttttaattttgcttatttgtttattttgaaacagaaacttatgttccttcatcatttctcatactgactcagaattcctgatcctcctggcttctatcgccaccaccagacagaacataatgttctttttgttttgttttgttttgtttttttgaaacagggtttctctgtgtagctttggagcctatcctggcactcgctctggagatcaagctggccttgaacccacagagatctgcctgcctctgcctcccgagtgctgggaataaaggcatgcgccaccaacacccggccataatgttcttgtataataaattttcatcagaagcatgctcattcctgtcaaaattgtaaataataatgaattctaaaaatacaactaatgtccaagaacctcaactgttcgtatcttctcctgggacgtcttaggctccttctctttgtttttttttttctctttcccagccatggtttctctgtaaaagtcctggctgtcctggaacttgccttgtagttcatgttggccttgaactcacagagatctgtaatgagggagggatctctgtgattaagtatggtttattgaacaggtgcaaaatataaaatacactcacaatacataacaagaatcctctcattccaaagagtgatggggaagtccccaaaccattgctgccagcgagacggccacagtccaagagagcatccatcgccccaccctggccttttattctgggtcacacccccccagagaagaccacactcattgggccaagccaccccaatacaattggctgttggatcaaattcccacaccagatctgcctgcttctgcctactgagtgctgcgattaaaggtatgtgccactttaccaccaggctgctccttttctttgggagaaaggttttgtttatctaaagagtcacactcatggcaagtatttctcaattacagagataggtttttgtcaagggtgaaggagttgagtacagtggaacacacctgtaatatttcaggggactgaaatgggaggaatggtgtgaattccagaccatgggtcacatggcaagtagtaagccagccagagtttgatatatgtttattatcaaacataataatgataataacaaaaatctgggcctgatggtatttctataatctcagcactataatagagccaagaggatcaggagttcaaagtcattctctttctaggctacacagtgagtgaattctaggccagtcttaggtataggagatcctgtctcaaatccagtcaacgagccaatcaactaccactaccaccatcataaataaataaatacataagtaaataaagtgccattggtgtttcaacaaggaatattacttataagaagttacacaacatgtctttaaatggcttctctcactgtcagctggtctggccttgggattatcattcattagaggaagtggcatggtttgggcagatggcaggcagcatgtatttctctctgcctgcccatctttactcttcttgtcaccaaagacaaatattgggggggaacaaaaggaagaagaaaaaattcagcttgccacgatcatatttggaatcccagaatttggggagctgaggcaagggatttgttaaaagttgcaggccaggctgggtggtggtgtcacatgcgtttaatcccaggacttgggagacagagacaggtggatctcggtgagttcgaggtcagactgttctgcctagttctaggacaggctacacactcaagcgttttccatttcctttgttttatctgaacctgtaactttctgtttgttttttgagacagaatttctctgtgtagccctggaacttgctctgtagaccaggctggccttaaactcagagatctgcctgcctctctgcctccctagtgctgggattggggtgtgtgtgtgtatgtgtgtgtgtgtgtgtgtgtgtgtgtatgtaccacttcacctggcaaatgccgctgcagctcaccccgatggcctctgacttattatcctgatgatcataaccttgaactgatcctcctgctttaatgctgagtgctggtgtacaggtgtgggccaccatggctgaccttgttttattgagactgggtcttactatgtggcccaggtactggtcttgaatcggcagttcttttgcttcagtttcctaagggttgggattacaggtgtgggctaccacaccaggctgcttcattttagttattttttaaaaatgttccttttaaattttcttttatgtgcactggtgttttgcctgcatgtatggctgtgtgagggtgtgggacccctggaactagaactatagacagttgtgagctgccatggggttgctggaaattgaaccgtggtccttggaaagaacagtcagtgctcttaaccagtgagccatagctccagccccctcatttagttagaattcctgaactataatttttgaaaaattatgagtaattcttcaaatataattttgagtctttgagaaacagaaaggctgtgtagcttaaagtaatcgtcctacagcccaactactttctttgttgctctgagcccccccccccccatttaagacaggctagtgactcatgtttataatcctacttcatgggaggctgaaggaggaggaatggtgagagttccagaccatcatggactacactgtgtgttctaggctagctagagatccaaaacagaccctttttttggaaacaaaacaatttgtgaggcctgctggtgttttaaacacaacctttgggagacagaggcaggagtatggcttaaggttcaaggatagcctagtctaggtgagtgagttcaagccggccaaatgtacattaagatcttgtttcaacaaacaaaaacatgccaggcagtggtggtgcttgccttcgcttttaattctagcagtccagaggcaggggcagcagatcccttgagttggaggtcagcctggtctacagagggagttccagaagatggggctgcatagagaaaaaccaaaaacaaacaaaaatcagaacagaacctgcttatatacatgcccctttccccatgaacacacacaaaacccccacaaagctcttggtctaatgcagaaactaataatgacagctactagcttttttttgttgttttggttttttttttgttttttgagacacggtttctctgttttgctttggaggttgtctggcctctaactcacaaagatctgcctgcctttgcttctccagtgctgggattaaaggtatgcaccgccaaagcccggcttttttttttttttttttttttttttggtactagcttaaaaaaaaattaaattcctatagtctagaaagaggaaggaatctgtgagatagctcagctggcaaagatgcatgtcactaagcctgatgcatgaggtgaagtttgatctgctggacctacagggtggaaggagagcatgcccccaacttgtgctctgacattcacacgcactccttcgaatgtacgcgcccaagcacagacacgcacacataggcaataaatcaatgtgaaagcaaacaagtaagtaaaaggagtaagaacaatttaccacccaaaacaaccataaaggcattaaggcctgtacctccagctgccctcccccgtagccccgccccaggactccgccctcnnnnnnnnnnnnnnnnnnnnnnnnnnnnnnnnnnnnnnnnnnnnnnnnnnnnnnnnnnnnnnnnnnnnnnnnnnnnnnnnnnnnnnnnnnnnnnnnnnnnnnnnnnnnnnnnnnnnnnnnnnnnnnnnnnnnnnnnnnnnnnnnnnnnnnnnnnnnnnnnnnnnnnnnnnnnnnnnnnnnnnnnnnnnnnnnnnnnnnnnnnnnnnnnnnnnnnnnnnnnnnnnnnnnnnnnnnnnnnnnnnnnnnnnnnnnnnnnnnnnnnnnnnnnnnnnnnnnnnnnnnnnnnnnnnnnnnnnnnnnnnnnnnnnnnnnnnnnnnnnnnnnnnnnnnnnnnnnnnnnnnnnnnnnnnnnnnnnnnnnnnnnnnnnnnnnnnnnnnnnnnnnnnnnnnnnnnnnnnnnnnnnnnnnnnnnnnnnnnnnnnnnnnnnnnnnnnnnnnnnnnnnnnnnnnnnnnnnnnnnnnnnnnnnnnnnnnnnnnnnnnnnnnnnnnnnnnnnnnnnnnnnnnnnnagcggccttggatcgcaggcctggcgggcgcactatggactggccgcgagagaagtattgttttgttttcgcggcatcggggctgaaagtccggtcccgggaaaccgtaggcacgccggatttggagcgacgtgtggtagatgttggaagacgcggggccggtgttccggaggggcctgttgagttcaggctctggggtcggaccgcctgggttcacgtctggctccccggcgtacaagctgtgtgaccttggctctccccgagtctcagttgctctgtctgaaaaatgggctgtgaggaacgttctctgaactgccctgtagttgggtttagtgagttcagcggaacgccctgcacacacagttgcacatcacaagtgtgaaagctcgctattgtaattgcggtttattaatcatgtgtgcacctcggaaaagtccgaaattgcgatctggttgtgtattttttatttattttttttaaagatgtctttgccaagtcccgctgggtgacccggttgtgttttcattcttacctccgtcttgccatttcatttatctgatgttctttctagaatcgtaagatctttgcaggagggtttgtatccttaataagaacaataaaaacttaattgtcattaaaatacagtaatagccaacattacttcagtaccaggcattttgcattcgattcatttaatatttattaaatcatctcttaagtacaaagtatcactccaggcccagaggatatggcaacaaagtagattctggatttgagtttgagagaggggactcatgtaaactcttttgtggatttttctgtttatgcagaatggcattctaaaaacaggtatttgaggcactttcaaggcaggtgcatctttgagtttgaggccaacctgatctacacagccagttcctggtcaaccaggtctatattgtgagaccctgtctcaaaacaaaataaaaagtaaataaaaactgaaaccaggtatttgagtatgtccattgtgcagaggataaaatgagaggtattgagaacgccatgctctgcctccagagggttgttcttcagcgcttaaaagggaggatttatacagctgctttcttggactcttattccacattggactgaagaaatgcaaggtagatttagccattactcccttttgtagtgctgtgctcttgctgctcttgatggtcttgtggaggccgaccaggtaaccctgaggtctgacaaggatttcgttatattaggaaagtggaaaaaccttttatatgtatttaaattcatttacttatagcagtattgaggattgaatttagggccttgtactctatgctgtacactgaagtgtatccccagcctttttcagattgggtcttactaagttgcccaggcaacttgtaattctgtctcagcttcccagtagctaagaatacaggcccgcgtcactaggtctacctgaccatgtcttacattttcagttaaagacaggtcccaaaaagttgagtatggcgaaagcctatatgtaattgcagcacgcaggaggttgaggcagaaagatgtgagtttgaggtcaacccaagctatgccctgagattgttctggaaaaacaacaaaagctaagactttttggtttgttttgtaactagttttctttgcataaggcagtctgtagtgtttagtatgcttgcttattgattgatagctggattgaactgaggacctatgtgcaaggcaggtgtccccccccccccccccagtgtttctctaagtagctctggctgtcttggaacttgctctattgaccaggctggcctggaaactgcctcccatacctggcttggcctcttaactcttaatcctgtctcaggtgcctgaatactagcattacaggtgggcactgtcataccctagtctacttttccttaagttcagactaataaattacactgaacttcgttggtttgagtactttctttcattaagatagactcttactatatccgtagcctaggccagtcctacctcctggcctgacttcctcagagctggggtgttacaggcatgtgcccttttcagtcagtgcttctgtgttgaccatttgctgttcagaagcttacctacagtttcttgtttttcttgagtgctgaaggaacacaggccctagtgtatgctgggcaagtgctctaactgctagtgcttttaactatattcctggggaaagaagagtagaaaagaactcaaccctgagtctgctttcctaaactggaaatttctacatttccctggggaaatactgtagcactttatcttctggtgttcattccattaggatatatggctgagtttgcacacaatgcatgaatatttgttttgttttacacgttttttgtctgtcagtactggtcaaaaatcaaccaccacaaccagggcctcccattccctatgcaagtgttttaccattgagcttcattcaaaccctgaatattttgtgttattgaaaatcctgttgccctcaaacttgtaacactttctgcttcagccttttaaatgagggattctagatgtgagtctggctgaatatttgttttaaattttggtttaggctagggctgtaactcagtggtagtgtactcacccaccatgggcaaggccctgggtttgctcgattgctcataaataagtaacaattatagtcagactgaaaattgccattttaaggaataatgagctaaaatgtaagtggacatgacagtattgtctctccaaaccttggtgtgatagtcactagtcttgggagggagaccatcatcttaagtggatcttatcccttgacttattaagtatgctactcttgaaaaaaaaaaaaacaaacaccttatttagcagaagtagaatgcagtggtgtagtctaaacttttgtttgtcttttgtttttttaatgtctcctcacttatccttttttttcttaactttttttttatttgaattaggaacaggattgttttacatgacaatcccatttcccttcgcccacccgtcctccctacccccccccccccccccccccccaattttttttttttttttttttttttctgagactgtttctctgtgtaatagccttgactgtcttggaattccatttgtagactgtgctggccaactcacttgcctctgccttctggatgctgggatcaaaggtatggctttttacaggctaggatgaacttctgaaagctaatgttttgtctgtctttcctttttgagtcagtatctggaacatgctgcagtcctcctgtctctgctcccccacccccatccattttagcattataggcatgctttactaagcccagtctcctctgtaaaattaaaggtagttccctacatcatttgctttttttttttttttttttgagacaaggtttctgtgtagccctggctttccttgaacttgctctataagaagaccaggttggcttcaaactcagagatctgcctgtcgtctgcctcccaagcgccaggactaaaggcatgcaccaccatggccggcctcatttgcaggtttattctgatgattagtatgtgagagtggcatgtgaaatgctttagcggtacttggcacattgtttagctgctgttagttgctgaggatagtcacataggtgacttaggatcccacacttcatgggggtcctgcatagataaatggggaatggcagataaagtgtgtaaatcttttttcagatttatttgattttatgtgagaagtggaatatatcatgttaataaaatgacagtgaatttcagctggatttgtgcctaggaagtaccaaatgacaagaaaacctattacagaattcttcatagccttgacgctctttcttctcagatggtcctttctgtctacttacctgagaatacaaacttgcagactaagctatatcagggttatgagaatatcttcattttgtaattttattttgcctagcaaggtaaagtgtgaaattaataatgtgtcgaaaagtatataaatcagtgacccttgtcgggcgttggtggtgcacacctttattcccagcactcgggaggcagaggagatctctgagttccaggccagcctggtctacagagcgagtgccaggataggctccaaagctacacagagaaaccctgtctcaaaaaaaccaaataaataaataaataaataaataaataaataaataaataaataaatcagtgacccttgaaagaagcctaaacacatggagcagtatggtagttacagatatttcttacagtagagaggttctgtgcattcattactataaaaagatgtaagaattgtcctcttgagaagtgtttccttatgtggcacatagctattagcatgataaaagagaaatggaaatgtaccagagagaccttgttgaggataaactcattaccccttattttctctcctctaggcccactactgtctctaaccctaatctctggttgacttagttacttgtctgtatccatgagcttcctttcctctgagatgatcaaattattttcctgctcctttttgttggtattccttctagttactggattatcctaaactcctactttcagcatagcccatgctgatttcaaactcctgattctcttgtctctcaccttgcaagtactgagattgaaagcatgagccatcatgcctggacaggattgctataaatgacagtagagatgaagtgggaaagaaaatgcaatattggtttaatagcacacacctgtaatcccaggatttgggaggtggaggcaggaggattattacaaagtgccaagccagcctgagcctgggctttgtctcaaaacaaaacaaaacaaaacaaaacaaacccccgcttaaacaataactcttcgcggggccagatctcgtttaaggccatcctggactacagaatgagtgccaggacagccagggctacacagagaaaccctgactcaaaaaaaaaaaaaaaaaaaaaaaaaaaaaattgactcttgcaggtcatggtgtgtgcctgtaattctgctttttgggaggctgaggtgggaggatggaaattttgaggtctctctgtgctgtatagtcagactgtcttataatggggaagccaaatgaaaaactaaaaggatttgtttcttccttctgtttcgtattgctataatttaaatttttttgtttgtttttcgattcagggtttctcgtgtagctttggagcccatcctggcactcactctggagaccaggctggcctcgaactcacagagatctgcctgcctctgcctcctgagtgctgggaataaaggcatgcgccaccaacacctggcttgtattgctataattaaacgcagaaatcaaagtaaaattcagagtgacctatgtaaaattctgaatttataactctggattggcagacttaaattaaattagttgatggctacaaatatgtaatctaacctctctggtagcccaagttaaatgttactgtcaggcatgcacacagcccttgacacacacacacacacaaaccaccacacacacccacacacacacacacatannnnnnnnnnnnnnnnnnnnnnnncccctttgactttttctcttttaaaaatgttgcctcattcctttgttaattttggtcatcatgtagaggtcctgcctgcttttaatttttcaaaaccacatgagaacaaacattcacatagcacagatttattcatttaggtctcataaccctagagcaataataaacacacccacagtttcctggaattcacaacactcctgaccactaccaccccctgccccataaaaactaatatgccagtggtatttttctgcactataaaaatgtgacaagtttttattgacttcagtgctttttatttctttctagaaaaagtactgtcagccttgaggagaggtgacgggcagaaacatctctttttttcccccttttagttttacttttacccaggttggcctgaaactcagaaattttcctgcctatgcctcaagaattgcaggtgtgaactaccacattcaaccccctccatctctgtctctctctcatctctatatctgtatctttatttttgtttttcaaggcatggtttctctgtgtagtctggctgatctggaacttgctctgtagaacaggctggtctcaaactcactgagaacttcctgcctctgctccccaagtgctggaattgttttaattatttggtttatatgtatggtgtttagtctgtgtatatgtctttgtactacatatgtgcttggggcccagaagatggtttctatcccttgggactggaattgcagttgagttgggaaccaccatttgggtgctggaaaccaacctgagtcttctgggaggacagccagtgagtgctctttaaacagccgagccatttttctggccatttgtttttgtttccttttacagtgctgatatgacttgagtttgtcaagtaaactaccactgaatgatagcccaggagaatctttttttttgtgagacagaaccttcctatgtatcccaggctagtctggaagtgactgtgtaacccaggttggcttctgtgtgcaatgatcttcccacttctgcctcccaggtgttagggtggctttattttagtttttatctttttttctttccccaagacagggtttctctgtgaaacagtcctggctgtcctggaactcactctgtagatcagactggagacaagctctcacttaatgatctagactgatctcctatttgtggactaaagtgatccttagctgcccaaatactggtattgtaggtatatactactgtgcatagctcctgattgtatttgtattactgtttatttatttttcatttttatttatttatttattgagacaatctatgtagcccaggctacccttgaattcgttctgtagcccagaactgaaactaaggtagttctattgcttcagcctccctcctgtaggatcaaaggtgtatgtgtgtgtgtatgtatgtatgtatgtatgtatgtatgtatgtatgtatgtatgttcttggttctataatattttattttttaagttaaatttatttagccttggttggggatatagttcagtgatagaacaaattctgtatttgatcctttgcatacacatgatgcccccacatttagttttttgtttgtttgtgtttttccaagacagggtttctctgtggctttggaggctgtcctggaactagctggtctcaaactcacagagatccacctgcctctgcctcccaagtgctggaactaaaggcgtgcgtcaccaccacctggccccaagtttagtttttaaatacagtttttgttttcagtttttttgtttgtttgtttgtttaagttagggcctctctttgtagcctgtgctgtcctggaactcattctgtagaccaggctgtcctccatcttacagaaatctgcctgtctgtgtctcctgagtgctgggatcaaatgtgtgcaataccaagcccagctgtttatattgttttgaaagtgtgtgtgtgtgtgtgtgtgtgtgtgtgtgtgtgtgtgtgagagagagagagagagagagccagatgcattggatttcctggtgctgagaattagagacagttgtgaggtgcctcactgttaggaactgaactggggtccttgagaagagctccaagtactttaaaacttgtagggcatctttccagcatactcgtttattttttttcctgattagaaaaaaaaaacacataaaaattgcacatacttgggtaacacgttttgatacggttttcacttgaagagatgatcactcttcttctgagggtgggtgggacctgggacattactgatttaggctaagagagggaggtgcctgctttggaccagaataacattaacagtggatgttgaaatagtttcattcacgtatgtctaccttctttttcctttttcttttctctctttctctcttctctctttctctctctctgcccccccctctctctctcacctctctctctctctctctctctctctctctctctctctctctggtttttcaagacaggaattctgtgtataatcactatgactgtcctagagatctgcctgccttaaaggtatgcaccaccatcaccaagctgaaattctgagtattttgaaggtagagttggtaggtgtcggttcataggttgttgtgcacccccctttgattgtgtgtgtgatgtgtacacataggctcctgtaccaaggtgtgcttgtggagattggagaacgacttggaggtgccagttttgccctatcatgtgagttcaggatatccactcaggcctcaggcttggcagtagatgccttgacaagcagaaccatcttgcttggactgctcttctactcttttttattttaaataatggaggtgtcatctgttgagagcttgtttttctcaattttaaaaattagatttattcaatttttgttttatgtatttagcctgtatctatgtatgtatgtatgtatgtatgtatgtatgtgcacatgtgcatgcttgttgtctctggaagtcagaagaaggcatcagctcctctggagccgaagttcagatggttgtgagccaccctgagcgtcctggaagttgagcctgtcttcattgtaagagcaacaagtgttcttaaccattgagtcatttctccagttcctattttatttatgtgtttttttttttcttttgttgttgtgattggtctgggattcactgtgtagaccaggctggacttgaactcaagaaattagcctgctccagcctcttaatagctggagttaaaggtatgagccatcatactcagcccaacttcttttatttaaagacaggttcttataactctgctggctttgaactctctgtcatctgaagatggtcttgaactcctgagttgccaatatttgtctgtggacttgggatggggacaggggagaaagtcaaggcagtgctaaaattattggttgaggttactagtttaaaatcgtttttttgtttgtttgtttttgtttttgttttgtttttcgagacagggtttctctgtggctttggaggctgtcctggaactagctcttgtagaccaggctggtctccaactcacagagatctgcctgcctctgcctcctgagtgctgggattaaaggcatgcgccaccaacacccggctggggttactagtttaaaattgttttaaaaaattattcttatttcatttgcattggtatgttacctgcatgtatgtctatgtgagagtgtcagatcttggagttgcagacaggtataagctgccatgtgggtgctggaacttgaacctgagtcctctggaagaacagccagcactcttaactgcagagccattctctagcccccaaggttactagtttaatacttggagaatactttagtaggcatgggtaggaaacacagaatgtcagatgggttggttgtggggctttgaggaatatgtcaccagacccagcccagcctaatttcaattagttaattaaattttttatagggtctggggacatgaatgagttggtagaatgcatgcgacatatgcattaagctttgagtttgctctagggcacttcataaatcaagcagaagttcctaggaaatagaggcaaaatcagaagttcaaggccaaaattttactccattacgtatcaaggttgaggccagcctgagatatatgagaatcttgtttcaaaaaagcaaagacaacattaaaaaaaaaaaaaaaaaaaaaaaaaaaaaaaaagaaaagacaaaagtagacaacaaagcactcaggaagctgaggaaatagttcagtgaagagtttgctgaggtaaagtttttgctgtgcaagcatgggacttgagtttggatccccagccccaatataaaacccaggtgtggtggctgatggggaaacaggtataccctggggcccagtagaactagctacagtatagtgagagaccttgtctcagaaaataaggtagagagtgatagacaaacataactgacattgacctcttacatccatgtgtatacatttagttgagtgcacctgcatacattatgtattatgtgcacacacaaatgtctagcaatgaagtgaactgcagaaagttaccatttatcttatcactgaaaaattatatgctgagatttttgtatatctttatacaactataatacataaacatgatgtatttaaaaaatgaacttttactactttgcagtctgtaacctcaatcagatggtaagtctacaagactacatcttttactatgatttcctcaatatttgttgtaagatatctttaaagtgataatagctttcctgtcagagaaagctgcaaatgcactggttctggtggcacatgccgataggatttgctgaaggaggcggagacaggaggatcaagagtttgaggccactccaaagcaatgcagagaaaccctggggggggggggacaaaaaacaaaaaaacaaaaaaaaaacccaacaacaaacaaaagagtttgaggccagcctgggctacacatttgccaggcggtggtggcacatgcctttaatcccagcactcaggaggcagaggcaggggaacctctgggagtttgaggccagcctggtctacaaagctacacagagaaaccctgttttgaaaaaatttaaaaaaaaaaaaaagctgcaaatgactgtgtaataaaagcagatggttatctggctgaccacttcatgggtctgtcaagcagcatttccacccttttttctcagaaagtgtaaggttgtccatttcggaattacttgaatctagttgaatctgttatctctggttttcattagcagtagaaaaagcaaataatgaagctgtgaagttctgtaagtagatacaactgttctggaagtgaattagtccctttctgccatttgacactgcaactcagatactttgttccggcctcccaagagcacctgcacaccatgctgtataatctcccacacaaacacaaataaaaataaaaaaaaaaaattgggctggagagatggctcagtgattaagagcactgactgctcttccaaaggacctagattcaattcccagcatccacatggcagtttacaaatgtctgtaactccagttctaggggtaaagaaatggctcagccgttaactacaccatcttctctgtcagaggactggggttcagttcccagcacccacatgacaggtcacagctgtctgtaactccagtttcaatggatctgacatcctcataccaatgcacataaaatgaaaataactaaaaattaattattaaaaaactccatttctagagaatctggcaccctcatataggcatacgtgcagacaaaacaccactgcacataatataaacctaaaacaaatgaaaaaaatttaaatcttgccaatttttatgtgaccactggtcaccatcaataaaatgaacattgactgcatttttgatattataagatatagaacatcttcagtgtttttctgatttgatcaatactttgattttttacaattgtcaatgctgagaatgatatataatatgtagtacaaaatgccaaagtgtgtttagaccaagccaggcattggtggcccacccttttagtcccagcactcaggaagcagaggcaggcagatctctgtgagttcgagaccagcctggtctacaagagttagttccaggacagcctccaaagccacagagaaaccctgtctcaaaaaacagaaaaaaaaagtatgtttagaccatttcagaaattgtgtcctaggccaggtatgctagcacatgcctttgatctcagcactagttagtacataggcagacagagctcttgggttcagggcttacctggtctatagaaggagttccaggatagccagggctacagagagaaaaagccctgtcttgagaaaacaaacaaaaagggatattttcatttgtttgtgtgtctgcctgtatctgcaatgtgtatacagttgccagtggaggccagaagagaacactgcattccttagaactgaagttaataggtgatgctgggacctgaactctgagaagcaataaatgctcttttatttattttattattattattttgggttttggtttttcgagacagtgtttctctgtgtagttttggagcctgtcttggcacctgctctgtagaccaggctggtcttgaactcccaaagattctccctgcctctgccaccaccaccacctcccggcctgctgaactttctttctaggacctgttttccctatttgattttgaatttttggatggtgcatgttagaaatctacattaccacctcacacattcagttctgtgacttcatatgggatttgtgacagtttaatatgctggtgactgtggcataaaatcatctgtcatccatgagtttttaatttgcacaagaaataaatcatggggctgaagagatggctcagctggttttccagaggtcctgagttcaattcccagcaaacacatgatggctcacaaccatctgtaatgagatctggtgccctcttctggcctgcagggatacatgcatacagaacactgtatacataataaataatcttcttcttcttcttcttcttcttcttcttcttcttcttcttcttcttcttcttcttcttcttcctcctcctcctccctcctcctcctcttcttcttcttcttcttcttcttcttcttcttcttctatcgtttttttcagacagtttctctgtagctttggagcctgtcctagaacttgctctgtagaccaggctgggtttgaactcagagatctgcctgcctctgcctcccaagtgctgggattaaaggagtcacctggtaaataaataaattttgaaaggaaaaaaaagaaagaaatcactggctgggtatagtggtgtacaggtttaatctcagcattctgatcatattaattgcagcacttgggaggcaggggtaggtgggttttggtgaattgaagggcagcctggtctatgtaatgaatttcaggaagctgagattacatagtgagactgtgtctcaaaaataaataaataaaagtcactggtttaaatttgataatgtactttttttaagtgtgtgtatctgtctgctagtatgtgcatgtgagtgcaggtatgtgagctgctgcacatgggtgctgaatctcctctccagcctctaaatttgccaatattgatcaacttttttttttttttttcaaggcagggtttctctgtggctttggaggctgtcctggaactagctcttgtagaccaggctggccttgaactcacagagatcctcctgcctctgcctcccgagtgctgggattaaaggcgtgccgccaccaccgcccggctgataatcttttaaaacctttttttaaaaagatttatttatttactatgtatatagtgttttatctgcatatatccctgccagaagagggcattggatctcatagatggttgtgagtcatcatgtggttgctgggaactgaactcagaacctctaggaagagcagtcagtgttctgaacctttgagccatttctccagcccttaaaacctgtgggttggttctctcttaccacgcggttccaggggattgaattcaggtcatcaaatttgatgacaagcacctttacttgctgagtcatctttctggcactatgcctatttttctttcaagacggggtttctctgtgtagcatggctgtcctggaactcactatgtagaccaggctggcctcaaactcacagagataggcctgactctgcctgccgagagctgggtttaaaggtatgccacccagcctggctttaaaaaatgattttgtcttttatttttatttctacatttatttttaatttttaaaaaaggtctggctatattgccctgactggctcagatgcttgctatgtgtaccaggctggccaccaaaagttataggtaaataagtaaagcttattgttacacttcgagattacagtatttgtgtttggaagataaaaagcctattttagtgatgattttggtctttgtgcagacaataaaatgaaaatactggtttgggcttggtgtctttatagctagcattgttctgactccatggagtggatgtattgaaccaggtgttttacttcagctgtaccatctgtgggagcaggtggacagatcctctgtcatcaggaaaacacagctggtgagacttagatctaattggttgctttcctagctctttctagtcacatatacctgaatgcagtttacctcagtaaatgtgttgattttggttaggacattaacagcaaaagtgaacaaaaaagtaaaaaggtgtgagtatgtatgtattgagacattgcctgctgccttggaaatagtattatcctgtctcatcctcccaaattcttggattgcaggggtatgttactacacccacccctgcgtttttggatttatatcgagaaaaataatttaagggtttatttatttatttatttatttgtatttaactttgtgtgattatgttcatgtgtgtgcttatgcctttggagaccagtagatgttctttctgtgatgccattcactttgattttgagagtcttcctaacctcactgataggctagactggctggtgtagactgagttttttttttttttttctgcctggtcccgcagccgtttagctccaaataaacacacagagatttatattaattataaagtgtttggctgatggcttgggcttcttactggctagctctctcttaattattaacccataaatattaatctatatatttctacatggccttatcttctcagtagctacatggaatctccctggaagctcgtttctgcctcctctcaccaggattcccctctggtagctccgccaatacttcctgcctcgctactggctaagtgttttattcatcaaccaataagagaaacatatttacatattctccatcaagctggtatcaaatcccaggggtctgcctgttccctccttctcagcgcactcatcacaccagcattttttgttggtattaaatgctttaccaactgagccatctttccagtgatgggggatgtccttctgtatgtatgtttctcatattggttgatgagtaaaacactgtttggccaatgaggcaggaagataggtgggactaaggacgaggagaattctgggaaaggtaggcagagtgagcccaccaaagagaggagccatgtaaggaccaggaaggatgaatcaggtgtttttcagcaagataagaccacgtggaaatacatagattagtagaaatgggttaattaagacagagctagccaataagaagccctagtcactggccaattaatatagcatctgtgtgtgtatttggggctgagaagggtggcgggacctggtgggaaaagaaaaatccaccaataccagaacctgatttatctttgtaaaagagttgtgtgggtggtggtggtggtggtggtggtggtggtgggtgggagcccctgtgtgtatgggggttccaaggttggaagagaatattaggtattctgcttttatcacactttatcttagtcccttcagacatggtgtctcactgaacccaaaggtagcctggtgactggcagggcctcagtgatcctcctctttgtcaccaatacacagccataccctctccttttgttttgtttgtctattttgagtcagggtttcactgtagccatgacaatcctaaaatatggtatgtagaccagactggcctctaactcgtagagatctgcctgcctctgcctccttgagtgcaggaggtattaaagtcatgcactaccaagcccattgggggactatttttaattctttgtattcttaaaaataacttagcaaatgtctcatagatgcttaaaataaataatcatggttgtgtcattcctttggtgtcgtcggtgtagtggtacataaagtgatagccacgtcatgcagtggtggcacacacctttaatcccagcacttgggaggcagaggcaggcagatcaattggaaaataaagtgtttctttttcagttctggagatcaaatctaggactttatacttggtaaagatgatctaaaaccaagttacatgtccaatccttggtttgttaaaatagggcctcactgtgtagatctagctgtcctggtattagctgtgtttctctgcccctttttgggggtgggggtgggggtgggggnnnnnnnnnnnnnnnnnnnnnnnnnnnnnnnnnnnnnnnnnnnnnccaccacctggcaggcctctttttttttttagattcatttattttatgtttgtgggagttttgctttcatgccattacattgcctgcctggtgcccttggagttcagaagagggtgccagatcccttggaactggggttacaggtagttgtgagccaaaatgtgggtgctagaaatggaacctgggttctctgcaagagcagaacgattttaactgctgaaacatctctccagacccttttccctggcccccccacctcgtatttcaagacagggtttctctgtgtagctttggagcctgtcctggaactagctctgtacaccaggctggcttggaactcacagagatctgcctacctctgcctctcaagcgctggcttatttttttaaagcttttttaggtagtgtttcattatgttgcctatgcaggcctggagctgctagacccaagcagtcttttctgcctcatgctctagagttcagaatacaggtttgagctaccatgtctgtttttaaaactattatgtgtatggatgttttgcccatatgtgtgtgtctgtgcaccatatttgtgcaatgcccgtaagggtcagaagagggcagtgtattccctagaactggagatgcagataagtgtgggtgctggggattgaattctggtcctggaagagcagccagtgttcttaactgctgagacagctctccaggttctataatcttttgtttccgggaggatcttgaattccctatcctgtcagagtttcctgaatgttggggttgcaggcgtccaataccatgtctggtttcattattctttattatatatttcttcctccttcttctccctactcttttttttttttttttttttttttttttttttttttcttttttattacagcagttcttctgtctcagtcttccaagtactaggatgacagaggtataccaccaggactgatttcatgcctgtttctctctcattggaaataggctgcttacataatatgtagtatagttaaggacaaagaatcactgtacttatgtgcctattcatgacctgattgttggaagcatcataaaaatttctatgggtctttcaggaaagtaaagatggtttttgttttgtttttttttcaggatagggtttgtttttatggccctgactgtcctggagcttgttctgtagatcaggctggcctggagctcatagatccacctgcctctgcctcccaagtgctgagactaaagttgtttaccaccatgcctggcttaaagattttttttttttaaatagggtgtaatagggatgaattaaaggtttggggtatagcttaatcacggagcacttgactagcatgggtgctgacattcttggtccagtccttagaactgcttcagaaaagatggaattgagagcaatgatttttagggactgtcagggtgtaatgttttataaacacttgttttgaaggaagggtatgatttcacagctaagctgggggatgatggaaatgtcacagcagactgatgggggccatagttcaggtatatatagtgtttttaacaaagcctggaggtgggaaagaaccagagacgcctgcagaatagctaccgttgtcatttaaaccagagtgcatctgagactgttagaggagatccttttcaccttgtatttgattattttgaaaggtatttttcttgaactgttgccccgttattataaaaagagattctgttgtagttccacatcgaaactgcttcattcttcattccttctgggccttcctaataatgtctggagttacattggacttcatgtgttcctgtgcagaacaaaagcacatgatcattgaagcctgtagcataaatgagaggcttgtgcgggtggtgtgaaaggagctctcccagcctcacatgcctgggtgggcgagctacactaatagctcccagcagttctgaatcagacattgtggagccaggagtctagcatttggaattccattgcctgtgctaagggtctgtcttttatcctccaaaccaccatttgttaaatggcagtggacctgttgacaagagggggaagactggcaaagatcaagttaaaaggaggaaaaagttcaaaggtaggaaaataagacgaagggtttagtcatgtctttacctcccctcccagccccacctccctttggagacaggatctcaatatgtagccctggctggcctgcaactagtagaccaggttgacctggaattcaagagatgttcagcctgcctctgggccgacaatgtaggttaccactctggcttttttttttttttttaatccatctgttaattatttaattttaggattttggtaattcattacatagaatttcattcctgaaagctgggcttgtgtgtgtgtgtgtgtgtgtgtgtgtgtgtgtgtgtgaatatgtgtgtgtgtgtgtttctttaatcccagcacttgggaggcagaggcaggtgggtctctgtgagttcgaggccagcctggtctacaagatcgagtgtccagaccggctccaaagctacacagagaatccctgtctcgaaaaaccaaaacaaaaaaccaaataaacaaaaaacaacatttcaaagcatgttgaaccaaggttgattctctgtgagaagaccaatgagaggacagaggccatgtctctgtcatattttggttgttttttagttaaatgagccagaacagtcttcactttagcttttataaaagtggacaggcagggtggagatgggtgggtggatactgtgagtagtgtgctatagattgataaaatagtgagttacctgctaccaccttctaatttatgctgccttctctttttcaaggattcctttcagttttaaacccattgttttcactgtccatagatgttgtccatttggcttgttttcctgtgttttcagatctaggtgtttctaattgcatggatttttcagggatgcagtgatttttactggtgctttcttctgaagcctttctttcttgcatacacttttatattctttttttaagattttatttatttatttattatatatacaacattctgcttccatgtatatctgcacaccagaagaggacaccacatctcataacagatggttgtgcgccaccatgtgtttctgggaattgaactcaggacttctggaagagcagtcacctttatattctttatcttgaaaaaataagagatatatggccaaggatgaagctaggttcgtagaatgcatgaccaccatctacaatgcccaggatttgatctccggcaccacataaactgagtgaggtattgtgtatctgcgttatattctgaggacagcttagagtccatggcttaaaacttgtaatcgactcacaataaactatatatttcaagtgtataagtgggtctagggagatgccatagtggttagttttcactgtgtaactctagcttgtttggagttagcgatgttgtacaagctgactctcccacccccattatctatattgtttatgtgtatgggtgtttgtgcaccacttgcatgcttttcgtccttggaaaccagaagagggtattgcatccctctggaactagagttgaaaatagtttatgaggccgtggtggtgcatgtctttagtcccagtactcgggaggcagaggcgggccgaactctgtgagttgaggccagcctggtctacagagatacacagagaaaccctatcacgggggaaaaaaaaaaagagaatagtttatgtgggtgctgggacttgaacctgggcctatagaagagcagttagggctttttttttttttaaatcatttttttattctaaaaacagtctttcttattttacataccaatcccatttcccactccctcccctcctcctgctaccctctcttttccccattccttcccctaccctctccttagagagggtaaggcttccatgggagtcaaggaactctggcaccttactttgaggcgcagtcagtgctcttactcactgattcttcttcatcccagccctctcctgccttatgtattttttaaattgttttaggggttcttgtattttgaggctgggtctcaccaagtaacttggcaaatagaacaagctggcctcaaattcacagatctagtttcatctttacacgtgcttcgattaaaggcatgcattaccatgtctggctttaaatttttatttattcattttaattttaaaaatgtattttaggccaggcattgtggttcatccctttgatcccagcacttaggaagcagattcagaggatctttgtgagtttgagaccagtttggtctacataatgagttccagggcattgtagaaaagccctgtttcaaagataatctaaataaataagtaaatataatacacacaacaaataaattgtatgtgtagttgttttgtctgcataccatgttagtgtctggtgccaaggaggccaggagagggtgttgtgtcctttgagactggagttagaaagtttttagataccatgtgggtactggggtttgaaactgggtcctttgaaagagtagccagtactcttaattcttgagacatctttccagtccctcaatttttaattgtttttatttactttttattttattattatttttgtttatttttagagacagggtttctcttagtaaccctggctgtcctggaactccatctgtagaccaggctggcctccaattcaaggatctgctgcctctgcctcccaagtgctgggattaaacgcatgagccaccaatgcctggtatgcctcagaattcatctgtctatccacctacctccctctctccctccctacctaatctatctagtttcttgagatagggtttctctatgtaaatctggttgtcctagaatttgctctatagattagactgacctcaaattcaccttgatctgaatgcctctgcctccctagtggcaggattaaaggcatgcaccatcgctgcctggcctgaacttttatttttaattatgtgggtttatgtatggagtgcagtgcccacagaggccagaagaggatgttggattccctgaggctagactagagttacaagccactgggaactccctgagtggatactgggaaccaaattctgcaagagcaccaagtgcaacccccccccccaaaaaaaaaaaaacagggtttctctgtggctttggaggctgtcctggaactagctcttgtagaccaggctggtctcgaactcacagagatccgcctgcctctgcctgtcgagtgctgggattaaaggcgtgcaccaccggtggcgccaagttctcttaacctaagtcatctctcatttctgtttttgttttgagacttcttagggttgcctttgaactcactatttagctgaagatgaccttgatgtacttaattacttgagttctggaattacaagtttatgtatgtcattccaccctcccagtctctcatcccaacctcttttgtttatttacttatttaacttattgagacagtctctctaagctgctcactagtcttgaactcaccatattgtccaggatagctttgaccttgggatactcctgcctcagctttccacatagcttacactgtcaccagcccaggtctcttaagtctttagacacagctttcagaagtctttggaaactatttgctttctgatataaggagtttgattcttttctctcccttgtggggagggcaccattcttcttaacaagttgcttttattgggaaataatatttagaaaccataatgttcatgctagaacttactatatagataagttggccttaaacttgctctggtagccgggctgtggtggcacacacctttaacttgggaggcagagagaggcaggtggatctctgtaacaataaatctttctgccaagccacccgagccccactgccacaataaggtcccaagtaacacagagagacttatattaggtacagtgctgctggccaatgactaggatttcttactaatctttattaatctatatattttataaagacttatctgatcaaggacgccggcggcatgcatcctctcttgtctcaatcacatggcggccatgtccctttcctacatttcccagaatcctccttctctcctagtctcacctaacttgctccccctattggccaacggtgctttatttgtcaaccagtaagacaaacatatacgcagaagtacctcttcctcatcagatctctatgaattccaggacagcctggtctacagggtgagttccaggacagctagcgctacacagaaaagccctatcttggaaaaacaaacaacaacaacaacaaaacttgagtgctcttcctgcttcagcctcttgactgttgctgggattacaggcacagtttaagagaactgtccttttcctttgttagaagctaaacattaaaacaaaaaactaaacattaaaacaaacaaaacataaaacatttgagggctggagagatggctcagtgtttaagagcatgactgctcttccagaggactcgggttcaaatcccagcccccacatggagctcacaactgtcgtaagtacacctgtgtgagtacaccctcacacagacaaacataaaaataaataataagaaagaaaactaactaaccaaaaaaccctaaacatgtattatattatctactttctgtgggtcttagttccaatgggtcataatcttgtactgaggactggagagatggctcagtggttaaagagtacttgttgctctttcagaggacccaggttctattcccagtctcctcttgttggcttataactatttgtaaactccagttccagagtatctgataccctcttgatctctgaaggcaccagccactcataaacattaaacaaacaatcaaataaataaaaagattccttacttatatagtgacaagaaattggcaagaaatcttaattccttgtcaggtggttctagaggtgcttgaatatttccatgacttggtagttctccagaatgagtaatttagaataaccccttgattcccttttccctccctccctctctttctcccttccctcttcctcctttccttctctcctttccttactttgctaggatcagtaaatactaagcagtgtggtgtgactgttgcccaggctggatttgaactcccagatttacacaatgtagtcccaagtagctgggactacagttgtgtgcccctgcatcctgcttaagtagtctagtcttgattaatttcttacttgataatattgtatagtactctgggtaagaattcagacatgccgctgacaccagtcaaaagttaatatatttgttttttactttccttgcaacaccaagataataatgtttaccaaatgtgttctgctttattgactctttgtaacaatcaaggaaataaaggtagtccttgatactcattgcttaaaataaaatcttgctactgcatcagttagtgtttctgcccactgcctctggggggtgatggcgagtcttcctttcttgtaaaatgtcatgcttgtaggcttcatttatccaaagtatggtagaggcgaaaggaaggcatatctatttgattatgtatgtgaaggatcttcattcattttgtttgtttttccagacagggtttctccgtgtagctgtcctggaactcactctgtagaccaggctggcctcaaactcatggagatccacctgcttctgcctcccaaatgcttagattaaaggcctttgccaccactgcctggcttagatcttcattcttaatgcatgttcttgtaaatgttatgtagcatatatgttcatgtaatatgacctgggaagaagacaaaacccctcctccattttaatctttagtctaaaaaaatatccacaggaaatttaaaaagtatacagagaagcttaagacccttcacccattttacccagtggtaagattgtgtataataactggtacattgtcagctttcagataccagttttcatgcagcagaaattgataagcattgtcttgtattagctcttgggaagtgctaaggattaaacttgttagtcgtgtggatctatcttcttgtctagagtctcaaaataattatgtcaattttactgtattcttcagttttgaaacaaacttacatacagttctaaatgttaatcatggggagcctcacattcgtgtttgcttggttttaaagctctttttgtaacttgtcttcatctttcacttacagtctttgcagcaccagaaccgtgttgtctgcattgtcttaatttcatcacgtgccatttttgcagagcacccagtctggatctgggaggcagcttgtgtgaatcatttacatatatttctgcttattcccaaaactaatttgcagctttttatttttgatccaattatacacttaaaatgtgtttacaatttattttatgaagacttttgtctcatagggtttaaaaaccagtccaaagaccagaagttattaaacaatagcaaaaacctacacaatatgtaggactttaaatggtgattgttaaacatttgattgtcccccaaaatgtgagtctgtgtgctcatgtatgactatacatttattctattagtgactgaaataaataagttttgcacattattcttcctgttattctcagccgtaaacaaattacatgcatttaacaagttagtgttagattggccaggagccactaggaggcgtgtacttagtgacatcagctggcaaagtgccctgatagcagagagggtggaaggggtagtggagagagaggaaacaggagggagggagggagggagggagggagggagggagggagagagggagagannnnnnnnnntttttttggggattctggcaaggtgaagagctggtctgtttggcaggaccttcccatctgggatccatctgtgtttccctggaatgggacaggcagctctagtcagtgagaaatcgcagatgtgagagagctgacacatgtccagctaatgaaaggaggaggaaggctggtctgcgattgggctttgaagattagggggagaaaagagagctttttaatacctatttcaagtagatttggtatatttacgcgtctggagtttttaatttggacattcagggtaagtgtacattttaatttagttctgggtgataaagtgcacaattctgccattccaaagctttttgcttatctcgaattgtgtgtttatggatattctgtgggtttagtcctggtttcattttgatgcttcatttggttttatgtttctatttaatttttcattgccacctttgcatttttgaatggaaagtttagttaaaatcagatgtagttcataattctacagttagaaaagtagtcctacaaatacttctttaagctctcccatattgaatacttctggcatattctgagggaattgctttttcttaagttatgtataaaagcagtgaagttatgtataaagagaagactgctacaatgctcttttccattgtcagattttatttcaaagtaatcagacatgtaactaaaagagattgcagcaaagctagtgtcctctctgcattttatttacatcttgttatgttttgctcctatactatttttctatgactgaaataacatcaaatcagacttgaattgtgaattggagtgctcaggagtgtgctcacaacacacacacacacacacacacacacacaacacacacccctcttcaacccctactatgttctggagtctttgtcagttttgatgcctattggttatttatatagtgttactaatttttgaaagacttcccaatcagccccctacatgtagaacctgagtttagtatatactgtatatataggttttatttcttagttttctcatcttgtgcaatctgctgctctgagccccatttggtttgtttgctttcctgcctgcagctcccttttttctctttctcaactggatcttactatgtatctaggtacaccaggctagcttcccactcacagagatccaccctcccctgtctccctaaaggcatgtgccaccacagccagctgactcccaatttgtgacggtagtggggaaatgtgtccagagcctttccagcacatggaaggcagcttaaaattttttgaggtatttatttatttatttatttatttatttatttatttatttatttatttatttatgttgttgtggcaggttcctaaacccttttcacttccatattgagctataactgtatctggtctaacttgtgatttcagggtattattttgactgcatgtgtatctgtaccacacagatgcctgatgcccacagaggccagaaaagatcccctagaactggagttagagatggttgtcagctgcattgtgggtgctgggaattgaacccaggtccatctcttcagaccctgcacccaccttttagatagtttgtatttgttgtggtgtatgtcatctttgctaagcctttctatgactgtagagtttggaaagcattctgagtataaaatgcaaatgtaataaatattccctttaactgcaccagaatagaagacctttgaaaagtcaacttatccaagtgaagtattgattgtattactttgaaagagcatgtttatttaaaaaatattttcttttttcttttttttgaattagaaagaagattgttttacatgtcaaacccagttagttccctctccctccttccttatcacccccccaactaaaactctacctatcacctacccctcaaaaatatttttatgtttatttgtctattgctgttttttctatccattgtgtgggttccaggaatcaaatttaggtcatgtcaggcttggctgcaaagggcctttacccactgagccatctcactagtcgtcactatttaaattgtacctggctcccccaaaattctatgacatgacaaatgggagcttttaaaataacatttctttttaaataatttttagtattttaggtgtatgagtgttttggccgcatatatatgcaccacctgcaagcctgtgttcatagaagtcaaaagagggcatgggatcccctggaattagagttgcagatggctgtgtgccactctgtgtcttgcttcttcagaagagtatccagagttcttaacttctgagccatcactctactccccaataacttttattcagtaaagttcttcagctttatatcacctgagcattttaaggaaactgtagtgctttttgtttgtttaattaaagactgggtgtctcagtatccctcagtagctggaatttgctttgtaggctctcttggcctcagacttgtagcaataccctgtgtgcctcctgggttaggagaacaggcatgcacctggctgtaatgcactgtaatgcagcataatgctcacattctcttctctctaaaaaatggagttttacctccatttccctcaagtagtaagaactttttaaatggattttgtttgtttgcttgttttgttttttcgtttttcaagatagggttgctctgtgtatcactggtagccctggctctctgtagaccaggctagcctcggactcagagatttgcctgcctctgcctcccaagctctgggattaaaggtgtgtgccaccatcatgcccagctttaaatggatctttttagaaatttctttaatgttaaattgactgaatttgtagaacaaatttaggaagttttgataggtgcagtggacagcagctgagacttgtttgactatttgagaggctataatgtaacatcaaatttacatggtcctccttcagtgaacagtattgtatctttaggacctatgttcttgaagatgaatggggagaaaaggacttaatgctgaaagtgtagtgtaggctgtagtctgatatgggagagcctaaaaaggtttattttttaaaattattactgctatatgtccattctggcaataatgtttcatattttgaggctcaggatttcatctaagaccttgtgcatgctaaaaaagcatgtgttctatcagctattagtggctaagttcctagccctcaggaatacattggtccaggtttggcatagaactatgtatgtagcccagccaggtcttaaactaacagtaattttccagtcagcctcccaaatgcttggataacaggttattttatcacatctgactaatataataatccatggaccccaaataaaagtgtttgattaacagtcctgattgggtgagatgaggccctgagttccgtgttcgcttgtgggtgggagtcccacctaaggctcagcagttaaaatcaaaaccaggcccagtggcacttgctgtcaattctagaactccaggaatcacaaacaggaggatctctatgagttcaaggccagcttgatctacaagtcaagttccaggatgccctttgaaaagaaagaccctgtttcaaaacaaataaaccaataagattataccattttttttttttttaagatttgttaccttttatgtgtgggcacatgagtgaatcaagtgtgcacttgcacaggccctatggaggtgtagtggggggtatgccccttggaacaggagttagaggtgtttgtgaactgcctagtgggttggttgcagggttctttggtagagcagtaagcactctttaactactgagccatctctccaacccataaccaaaaaaaatcttttgagttaaatattactgaggaaagtcatagtattttctgtggactgagaaagccccatatgtggaaaccagaggacagcttgcaggagtcagtttcttcttccacaatgagggtttcagagattaagctaagattgctaggctctttacctccaagtcatattggtgggcccagggaaggttctctttatttttaactttcattgattcttcgtggatttcacgtcattcattctgaccccacttacctctctgccccctcaaatctgacttctgccattgcagccttttccccataccaaggttctttatttttgtataatcttattaaatgcattattatatcttaagctgagggaatgaatggtcatcggtagagcattgcccagtcatgtgctagtttcagtctccagcaaggtgcatgtatgaggaaggggagagaatcctccctggccccatagtttttaataaccagtggctgagcttagaatggtattctggatttccagaatattcgtcgtactgtcttattttgtctatctacctatttatttatttatttgacagggtctcactgtgtagcctggctagcctggaatttacagagaccctcttgttattaattctggtttctgggattaaaaggtgtataccacaacacccaacattttacaaattctttattttatttttgagacagggtttttctgtgtgcagccctggctgtcctggaactcacaaagatcctctgcctcccaagtgctgggagtaaaggtgattatatgtgttcatgatatcttgaagttatttggaattttttcttagtattttctgataaggttttgccgagttgtccaagctggccatgctttcacaggtcctgggatttcagatgtgaaccaccatacctagttttgatattttggggggtagacaggggaagatgttaagacaggaactcagtgctagtatttgaattccttcccaggtagctatggagtacttgaatggatttagaggatcctcatgtctgcacctcccaatgctgtgattatagatgtgggtgtgaaccgttgtgcccagtttaggcttttttgtatataaatacatataattattattattattattatttttggttgtgaacccagcctttaacaactgaaccatctctctagcccagactttttttttatttaaaggtgagatcgtagaggagataaattaagaatgcacaaaatcaataagttctagaagtcattgccaacagagggaatcaaatcctttggagaggaggtaacatttgatttggaatccttgtgctttattgggggaatgatgggcagatagaaatatactagtttcagacggactgctcttccagaggtcctgagttcaattcccagcaaccacatggtggctcacaaccatctataatgagatctggtaccctcttctgactagcatgcaggcagaacactgtatacataataataaataaaatctttaaaagaaagaaagaaactagtttcaatccccagcaaggtgcttgcatggggagggggggaagaaagttctccctggcccagatttcagtaccttaattttatcaattgcatagttacactagtttttttcttctatatttttgattgggatggggggatcttatgatctagactggtcttgaactcattatgtagccaaggctggtctttagctcctaatcttcctgattactcacagctgctgagattacaagtatgtgccaccatactcagtagtatggtatgcgtttttgttgtttcttttaattttattattattattattattattattattattattattattattatgtgcattggtgttttgcctgcatgtatatcttgtgtgagggtgttgaatcatggagttaccgacagttgtgagctgccttgtgggggtactaggaattgaaccagggtcctctagaagatcagttagtgctcttaactgctgagccatctctccagctccaacttttatttttaaattatgtgtatatatctttgtgggagcatcagcatgtgagtgcaggtgcccaaagaggtcaaaagtattgaaacccttgtagcttgtgttacaggtggttgtgagtcaccagatacgtccaaagaactgaatttggtcctctggaagtctcttaactgtttaatgttctccggtgcctttgctgtgtttgaaatctatccctttctattgctatctttcagatccaagcacagttgtttgattgtaaggcatttagcaaaatacatacgtatttttccccttgaatttgtggtttatttctgctccaagttcaaatcaataaataaaggaattaatagtggttgtgtcttaaagaaaaaaaaaactgctaactgggttttacatagagttactgactgatggactggaaaattttttaaagatttatttatttattatgtatacagtattctgtctgcatatattcctgcagctcagaagagggcaccagatctcattacagatggttgtgagttgccatgtggtttctgggaattgaactcaggtcctctggaagagcagtgagtgctcttaacctctgagccatttctccaaccccgacagttaacttttaagaactatgttattaactgggcctggtagtgcaggcaggcctatactactggcttctcagtagaatcaaaagttcaaagcctagcaggactacagagtaggttcaaggtcagcctgggcaatttagtgagactttgtctcaaaatgaataaaaagtgtctatggagactgtagtaaaaatgcatgtattaggtcctaggttcaagccatagcaccagtaaaatagtcagccacaggtcctgagtgtgtaaaggccctgtgtttagtacccagcaatcaaagtgtacacacacacacacacacacacacacacacacacacacacacacacacacacacactttgttttgacagatttattcgaggaaattgaaaatgcatatgggtctggttttctaaagcaagcactccccatccctaggactttttgtgcttagtttaaagcaaccattagtgaaaatgctgttttcttcccatcctgagcagcttgttagcaaggtggggtacagttctgtgtaaaacatggatacatgctacctgcagtgacatctcatagctggagctaaaatgtaagtggagtatgtgttttcttttttctttgtttgttagaaataggttctcctgtagcccaggctggccttgacctctgtatagctgaggatagctttgatcttctgatcctcctgcttctacctcctgcctctaccaagtactgggattacaatcatgtagtacaatgcctagatttagacaattttcacttgattgtgttaagaaaaatgaagaaagaaaattagtgttaagaaaaatgaagaaagaaaattagtgtatgtaggctttagcattagattaggttgtgtaaccatgagcgttgattctaacatcctctaagcctgtttcttcaactgtaaaattgtagtaaaatgagttttaagcattaaattaatatatgctacatgaatacttaataaagtttatcttcctgtgtaatttgtctttgcccttccaacattgataagtcatagtaatgaaaaaagtttaattggaatctgaatgttttttaatatgtctcttttcagattgatggaactacctctgcttccttaactaattcttgtcacaagagagaggggttcagtacagaatgtagtagccttaaaaactcaaacctgttgctgtgtgtgtggcaagctgtttagggaccttgccttactttgctggaagagctgggggatgggccacttcgagggtgacagatgtgtcctctgctcccagcaccaggtgcagccattgttgtggctggtctcttcatccctcctgtctgttactctgctctttgtagctcattgtttctgtaggaaattagcattaaatccatctgaaaccccatgtccctcaactgcaggtgactgttactggccccagctgccacccttgcgcttgattacttccatatgggctgtgcaaagaagtagtagtcatttattgattttcaccacaagcccccgcctcaaaccataataacctgaaatctattaggcccccaataggctgtaactcagttggcaagtacaactgtgatgaacattttacaagcaaaactaattatgtcctttttcttccttcttagtcacctccttcctaaatatcagatggagaaaaacccgagttgtcatagtgcagtagtaatttgaactggctgcttctgagtagtcgagcttgaagagtttggatggacttgtctggaaaattatagccactattttaaatactttaatcatacctatagtgttcaagcaagccacggtataataggtccttagggtggagatgttcctgaagggacacaaatttttatcacctgtttcataaaattatttggggtgttcagtaaatttaaaaaaaaggggggacacctagtttaaaaggttgcttgaaaattatatgcaatcagtattagctaaatccttgtgttttgtatttatttccttgtttgtactgtggttctagtttacctcagatactgcagtaagatggttaatgtcctagacttcttcctttatcatgaaatttgtgtgtttcattctgggccttgttatgaattgattgtagtgagcatagtgacacatccctgagatcccagtttttacaagcctggagggtctcagccatgaggccagcctcacacagtaagttcaagtctagcctacctgtcaaaacaagatctcaaagaaaatttgttaaaaggtgaattggatttaaagccctaaatccaattttaaggacagtatgaagttgcttttggcttccaatgcttatgttgatttttgacaaagttaacaccacaccaatgaagagtatcctaatagcctgtagtttcacagcccttgaagtcaagttggctgacctgacctagtagattttatcaccaaatccttagtttgtaatattataactcagattaataagccatttaaagcgacagtttcattacttcaaagttagtttgtgaaatggggaatataggaccatttctgttgaggatatatctttttacttcttttttccccctgttttctttcttttggagtttaaagaggtttaggatttgaaaaactcttggtaaccggcactttacctggcaacttctctgaaggtgagcctccaggtaaagtggggtgaacctagaatagtttttttttttttttttttttttttttttttttttttttcgggcagggttttccccagagatccgcctgcctctgcctcctgagtgctgggattaaaggtgtgcgccaccaacgcccagtttaggttagtgttttgagagctttgaaatctgcttcttcattttggggttttgtttgttttgagacagggtctcactatgttgctctggctatcctggaacttactatgtaggctaggttggccttgaactcatagaaatcttcctgcttctctgtgtcctccagaatgctgggattaaaggcgtgaaccaccatgtctggtttttgcttcattgtaagcataagaaagatggaaagatttagagatatcaggtgtcttactgttctactgctgtgaagagacaccatgactacagcaactcttagaaaacatttaattgggccttgcttacagtttcagagggttattccattgtcactatgttggggagcatgggtgctggatctgatatagacttttgtttttaaggtttatttattatgtatacagtgtccctgcaggccagaagaggacaccagatctcacctcagatggttgtgagccatcatgtggttgctgggaattgaactcaggatccctggaaagagcagctagtgttcttaaccactgagccatctctctagcccctggtgtggacttttaaaaccttaaagcccacccccagtgtcacacttcctttaacaaggccacacctaccaatctttttcaagtagtgccactactaatcattcaaatatatggtcctatgggggcattcttactctaaccgccacatcagggaagagaaagagtggcatttgaaactgggtcttctgctcatagagttggtgtacattcatttgcaatttggaactagaataaacagttgggacagttgtaagtacaatattggtgtagctattactacttaaaaactgtcagaagacaggcataggggtacatgcctttaatccgaattgaaccatgctcctctagaagagcagccaatattcttaactgctgaaccatctctccagccccttataaaaatttagaggttaatttatttatgtattttatgcatttgggtattttgtctgcatttatgaataccagaaaagggcattgaatcccatgagactacagttagagacagttgtgagccaccatgtggatgctgggaatttaacgatagatctctggaagagcaaccttaccccttaattgctgagctatctctccagtcctctgatcagtcaagcaatcaattaattaatctttggcttttcaaaacagggtttctttgtgtagccatggctgtcctggaactaactctgtagaccatgctggcctggaactcacaagggttctgggaatatgattctcatccttgtactttttcaacaggcacttgactgactgagctagttcctcagtactaaaattaattttttgaaatactatgtagctatgtatgatgtgttatacctataacccaacactcaagaagctaagggagtaaggctgccatgaatttgaggttcacctgggctagaggtcccatttctaataaaaattaataaatgaagatccacttgcctttgcctccccagggctggcttttgtcttgtttaatttcattttttgaggttctcactgtatatagccttggctggcctggaattcacaaaaatctgctgcttctgcctcctgagagctcaaagatgctaccatgccttgcccatgatttaaagtgtggtgggcattttgagttttcaaaatgaagttagacaaataaacttggatactgtacacccatattttattagacacttgggatggcaaaattacttctgaaatatttctggcaatctcattttcatttttatctgtaggacaaaaaaatataaactttttttctttcagtagaccatatggtgtttgcacagactgcttatgtgaggtggctgtgttatttttctttcaggataaaatgctttacctgatgccaatgttctgaaacatttatttttctagtcattagtatgtgcagtaattattctaatcattctgtttttctttgctcctctcacacctccttagggtgtcatgtattctaggctagcctaaaactttctcaagcttagaatgactttgaatttctgatcttcctctttctaccttttgagtactaagattacagttctgtaccacacacataattttgagttactaagggtctaacccagggctcccttcattttaggcttagcactaccagataaaccattgcccccccccccaaaaaaaaaagagctcttggctgttcttgtttttgagacaatcttactgtgtgtccctggctgacctggaactcactatgtggattaaactgactttgaactcagagattcatattcctcaccctcatgaatgctaggattaaaggtaagacatgccctatcattcttagcctataatttcttttctttttttcttctggattctacagttaatgtgattctatagtttgtgtagtgcttaaccctaattttatatgagctttttaattttttaaaaagattttatttatttattatgtaattatgtatacagtcttctgcctgcatgccagcagagggcacaagatctcatttaaggtggttgtgagccaccatgtggttgctgggaattgaactcaggacctctggaaaaacagtcagtggctcttaatcgctgagccatctctgcagccccaagctttttaatttttaaagttgtctttttgggtcagtgatacggctcagtgaataaggacaactgccatacctgaccaacctcagttcaatccctgggatccacatggtacaaagagaaaaccagttccagaagaaggtgttggattctctagaactggtgttgcaactgagtcaccatatgggtgttgggaaccaaacttggatcgtctgcaggaacagcaagtgtcagtgagccatctctgaagctcccaaagatctccttttgcaataatagtaactatggtacttacatgtttactcagatggcataggtggctatttgctctgccaaagtgctcatctaccttccatttatgttgcttggattcagtccctgctatattataggctcatatttacattgtgcttttaatctggaaaagctttttatccccataaaggcccctcaggggcaggaagtaaaagctaggtgtaatgtttttatagaggtgaaacctgagaccacatcattctgctatcattttagttcttagataaggtctttttccatagttggactgcaaagagtgctttccaataggaagaacctccttcagttatgtggatagacctgagtgctgcctgaggaggcaccctaccaggagtgcctactggcacgaaggcagcatggttgctggtcatagagctaacagtctgacatctgcaagctacagctgtactgttttgctacagtctgtctatatttctgcttgcatttgtgaagaatcacagaatctggaagactgtaagttaaccattccaaacttggaagtttgctgtgtgtgggggagtattctgtactctggagagctgtccatgaaatctcatagttgatactgttctctcagttcatttattgccatctttagtttgtcattcctatgccagttttagtttaatgccagaataagattgagctatcatgatagatgaattgagtgggtgctaattgtgtcaccggagtgtctgccacaattttctctacctcatttggttcttctattctttagtttgttttggtaaacatataatacttggttacatttcaggtattactgagcagggttgcttgttgacctctctgctatcccacttaacacaggctctcagtaactaacccatcctgagtcctggcctcctattcatggtgacattcttcctgccccattctcccaagtgccacgattaaaggtgtgaaccatcattccaggcggtgtggtttgtttatttatgctttagagacaagattgtgtcttgtgtacctctggttgcttggtaaccaagcaactctgcagtcacactgagctctgggcaggcctcctgttactttctgattactggaattacaggcatgtgccagtacattgggtttatcagtcctggagattgaacccaggactttgtgctactaaagatgtattctaccaactgagccatattccaggtgtagtgtatttgttaactatattttaaggcatatctgttgctacttctaaaaccagcccattaatttgttaagggtgagaagcccttttgattgtcagggaggacataactgggctcttttatgtcatcagtgtcatttctcttaaattcctagtcaaaatgtacaaacttctgcttgcatttgtgaagaatcacagaatctggaagactgtaagttaaccattccaaacttggaagtttgctgtgtgtgggggagtattctgtggaatcttacaataattttctctttgttgttgttttgtttttgagacaggttctccctaattagctctggttgtcctggaactcacactgtagatcagcctggcctagaacttagagagatctgcctgcatcagcctcccaagtgctaggattaaaggcgtgcacctctcgttttggatttcttttgttactagttctaggctctaagtacaccacaactatcaacaacaaccaagcaatcctgaataacattatttctgtccttcagtttttggttaagtggtaaagaattggatatggttctgtacacctgttgtcccagcacttgggaggtagaggcaatatacttactagctagaggttcaaagccgggctcaggtatataggctagcattaggtaacataagaaccaataaataaaggaaaaaagaaaactatcttcttgtttgtatttctttttgagacagcctttcttgctgtcctggaatgaattctgtagatcaggctggctttggaactcaagagatcttcctgcctccgcttcttgagtgttaggattaaaaaggtgtgcactaccgagaattatttctaaggcaatttatgtatgattgagccatttttcattgagtaatgagtcttttttttttttgtagtagtagtagtatttcagttttttaaatagccctctccccagtagtcacattgaagtcagatctatggaaaaagacaatttgagcctaaagtttaatgtggaaataagataaactgtttctacatatttgttgaaagaaccattgttgacagtgggcgtttcttaaagaactcctgtattcactagtactgccccccccccactctccccttagtcatcttattgcaagctttcagagttgctgtagtgtgcagtgttccatggctggtgtaaaaactccctgcttgtaatgcctagagctgtcatccaaggagaccaaacacatggcactacactgcatttccagatgtccttccctctgtttgggtgacttggagctaagagaagggtgtttgctcttgaataggagaaaaaaaaaacattccttggcataaggcccaccctggcaccattcccacatctgctgttcattagaagtgaatgctggtcagtcaggatgtcagggtgctggtctgattatcaggcccaggcttcaagaagaaatagggcaggaaaataaagggtgactcagctaggtctgcagagaacctggaagaccctttcataccgtggtacattcctgagtgctttccatgtattaatcaaaatgtctgccatatagaaactgcccttagaaaggaaggagggggagtgccgtagaaaaaaatttttttttcaagacagggtttctctgtggctttggaggctgtcctgaaactagcttttgtaaaccaggctggtctcgaactcacagagatctgcctgcctctgactcccgagtgctaggattaaagatgtgcattctttacattaatattaatatcttggactatatcacccctccctaaaatatagaggtgttcttgaattttaaattttttctttttataaaactggtagttatagtgaaaaagttgcaaaacattaaattttcttgtttatttaaagttggatgtgtaggaggttacttactgtgattgaaaattttttttactctttactatttggggggcctgccacctcacccccaaataaatacacagacttattcttacttatgaatacccagcattagcttggcttatgtctaaccagcttttctcaacttaaatcccgtctaccttttgccttggggcttttacctttctctatctattctatatacatttctttccttcttactccgtggttgattatgtggatgggtgactggtccctggcatcctcttcttttctctctccttctcctttcttctatttattctctctgcctggtagctccacttatccctctcctgcctagctgttggccattcagctctttattagatcaatcaggtgtttaggcaggcaaagtaacacaacttcacagagttaaacaaatgcaacataaaagaatgcaacatatctttgcatcattaaacaaatattccacaacacaaacaatctaacacatcttaaaataacattccacaacaagttcagtgccacagcccgttaattcagcacccccagtgcaggaggcttaactgtgatgagcatgaggccagcctgggctacatgaaaccctgtctccaaaaacgttaaaataaaaagagggtttaggattatctagtaggacctggatttacctttaaaaaaaggaaagcagccaggggtggtgatgcttgtgtgcctttgatcctagcactcaggcagaggcaggttgacttcgtagttcaagtccagcctggtccacagatcaagttccatgacagccacggctacacaaagaaaccctgtcaaaaaaccaaaaaagaaaaagaaagaaagaaagaaaaaaaaccccgagatacttaagagtactctttgcatgtaaataaaaagcaaatgtgtttgatattctgactggacttgaccatagtgatgagggcaattgtagttctgaacctagctctttgggttcttaggacctgaggaacagaggccaaccttaggaaacaagaaagcacagtggtggatttagggaactgtgatgtgaagttttcagtgttcttcattatgtagttgctgataggaatgctcagcatttggtaggtctctgtttgagggggttttggttgttggatgttactgttatttgaagaaaatatttcctgaagtcatgggtgtggcatggatattggaatgaaggtgtatgtatgagtgtacacattcatggttttcttcattggctgcttttttcttttggttttttgagacagggtttctctgtgtagctttgaagcctgtcctggaactctctcttagacatgctggtctcaaactcactgagatctgcctttatctacctccagagtgctgggaattaaaggcatgtgtcacctccaattggccccttttccttttttaacttaattttatttttgcaatagggtctcattatgcagtcttggatgtcctggaactcaattttttttttttttgcaattcaggctggttttgaactcaagagatctgcctacctttgccttccatgagctaggattaaaggcatgcaccacaatgctcagccatatcttctgaggattgccaacttaaaaaaattcccttttgccgggtagtggtagagcatgccttatagtctagcacacgggaggcagaggcaggtggatatctgtgagtttgaggccagcctgatctacagaatgagttccaggacaagccagggctacacagagaaaccctgtctagaaccaaaaaaaattcttttcaaggtccaggcatagttgtgcaagacttcagcactcaggaagcagaggtagataggcctctatgattttgaggccatccaggatgatacagtgaggatcccccctctccttctcctcctcccaccaatttgtgtgtgtgtgtgtgtgtgtgtgtgtgtgtgtgtgtgtgtgtacgcgcgcacaaatgataggtactaggtacttaggaagttgaggcaggaggattgcaattcctaggtcagcataggtaatctagcaagacctggtttcgaaatcaattaaaatgggctgagggccaagtaaaaaaaaacaaacaaaggcttatgatgttagccttgtgctaattttttgtgtgtgtgtgctaatgtttgtatagcaggaggaaggtcctgttttcagtccttaaaggcagcacaaaataaattcaaaataattcttttgattgatgttttatgcttgtgattggtattgtcaaacaggttagatagattctttttttttaaataattatttaacttttattttatgtgcattggtgtgaaggttcagatccactggaactggagttacaaacagttgtgagctgccatgtgggtgctgggaattgaacctgggccctctggaagaacagacagtgctcataaccactgagccatctctccagccctagatagattctttatgttgctctcttttgttttgctttaatctcagggaactagaggtgttaacctatgttttaaaactcacatttggtagtgatacaaacagctgtcacactgcataattgtcacatcattatgttagtcactgtcgctcactaatctgtaggtataaatctgtattctaactacatgtgatcgggaaaaactagttactgaaagagtttatgctggatagaccatctgctctttatttccaaatccaaaatgaaaagttagccatagcatctgcaaatctgttaattaagatgtgtataggaaggtgagctgagtgaagtctaaagaggtaactttgactcatgtaagcactgtgtggaagtataaaatacgtagacattctctttatttaatggaaaggaatcttagtttccaagggcagttgtaacataaaacagtgttgggatgataaaacacacatgtgtggctagacctggggagtctgaagccagcctcagctatggctgtcaagcccccccccctttttttgttgttgttgttgtacctaccctgtgtctgtttcagtattattaactcatggcaggaggactagaggttgagacaggattttattgtgtggcctggactgactttgagctataggcagctgttccgtgttggcctcttgactgactgttggggtcataggcatgacccactgtgccagctcatcagttcattttcactcttgccatctagctatatcatcaactccttgaggctgggattataccttcatgttatccttagtgcttagtgcagcacttgggttatgctaagggatctttgtgctaggagtgacaatagtattttagagaaaaatttctattcaaattattgactcataagctaactttgtctctaaaaataaaattaaaatttagttgaaaagggccagtggctcatgcctgtctgtacttgggaagcagaagtaggtggatctattgagtttgagacttagtctatatactatgtttcaggccaatgagggctacacagtgaaaccctgctcctaataaataaatatttttataaaagaattaattgaagaacttgaagctaaaaaatcatgcatacaacaaaaaatgagcctagataaggttatagactgtgacacagactgcagaaggaccaactgctgtgtaggcagaacaactttgtcctaatgactaaattaaaacaactgacttcacagactagtaaagtagttgtgtcctagaataaagatagttagatagaaacataagcaaatgaaaatagtgatatattatgttggtgaaaattcacattctagacatgtttctccgtacaatagtagctaaatatgcttcaacatagaaaatgctttgatggagtgagtaatatggagaaatcctaagacagtttgtttgtttgtttgtttatttatttatttatttatttatttatgtttttgattatgttgtttttggtttttcaattcagggtttctctgtgtagccttggctgtcctgggacccactctgtagagcaggctgacctcgaattcacagagatccacctgtctctgcctcccaagtgctgtgattaaaggtgtgtgtgcaccaccacatatggctaagttttttctctttgtggtgaatcatgtaataaatatttttaaataattaatttttcaaaaagaataattacattgctctgtgttgtgtgcattccttaattgttgatattctttgtaattataattttcagtgcctttacagttagcattgacatgctgttccaccatttaaccattcatcagcggaataaattgaattttcccttgagctattttcttaaggataaattctcaaggatcaaggtcacacactctgagagaatgaatattttgctggcaaaggaatgtgtttgttttttttttttaagattttatttattatgtatacaatgttctgcctgcatgtatgcctgcaggccggaagagggcaccagatctcattatagatggttgtgagccaccgtgtggtttcggggaatcgaactcaggacctctggaagagcagacagggctcttaacctttgagccatctctccagccccgtggttttttgttttgttttgttttgtttttttaaaccctactaatttaatattggtaatttgaaatacgtttcattttgtttttttcttctgactatatcagtaattagacactggcagtaatagaacaaatcacagtatagatagtacataaaaagctttaacagcccaaactggaaatgggtgactgttttctttttaaaagtcaccatcccaatttattgtatttggcagagctgtggggactggcataggaaatagcgggaatcggcattaaaactttggctatggtaagtagaaagtttattttaggaaaaagattagctatagaagaaaagcataagtactgtatgatttgccttatgcattataggtttaattatttattttattttatttttgagacaggtttttctctatacttggctgtcctagaacttgctctgcagttcaggctggccttgaactcaagagatccacctgcctctgccttctgagtgctgcataatgttttcttttaaaaatgtttgtttttttgcattgtgtgtttttgtaggtcaaaggacaacctgcacgagttagttttctccttccatcgagtgggtaccaggaatcaaactcaaacatcaggcttggtggcaatctccttaacctgctcactaacccaagtgtaatcctttgtcctttgcatgtgtgtctaagagggtagctagctaattaatgaatatggtagttgacagggtacagaagaaccaccagtgtggttgcctgcagccctgtcagcattgtgattaatggttgttgtctctgttattgaaatggagaaaactgaggttcttgttgataattagttgctgcccaccaagtttgaggcccgcctgagctacatgagatcttctagctactctggagtctaaggtgggaggagttccttgaggccagcatctcttcagatttatgccttcttacttagatgtcatactccctgcttttgtttgttgacatcagctttaattatattttccttaagtggatctttatggaaaataccttggatatttccaagacaaaatttgaattgtgttacatgcaattcatttgaactcagtagctgatcggttttgatatttaaagccattaattctaactcacagatttctgttctcaagcaaatgagagatttcatgtctggatcttttgttacaaacattgcttctttttttttttttttttttttttttttttttttttgagacagggtttttctgtgttgctttggagactatcctggcacttgctctgtagaccagtctggcctcaaactcacagagatcctcctgcctctgcctcccaagtgctgggattaaaggcgtggtgatagctcagtgtgtaaagatgctgccatatctgatgataccaatttgcttgctccctgggtctcaaacagtggaaagaaagaacacacaggttgtcctccgacctcctcatgtgcatggagctgagatgataggtgtgtaatctcatactagttattagctatgcctagaaatcacatagagtcaaatgcataaagcttcatgggtttttgttgttttgccctggcttgctagagtttgaaggcatgtaagcaggacagtgagggtttgtggtttgtcttttgatttgatgtggtaatgattgcccatgtcctcttcccatttaacagacaatgctgtctttacattattgcagaaaactctatgtcagaagttctgactaggtgttggacagttggggggtatgtccagaagcttctcatcatggaaacctctaccagtcctgaacctgaagttctgttgtttgtttgtttttttttctccacccgaaaatagaaaccgtgtgttcttgggggcacagggactcactctctctctctctctctctctctctctctctctctctctctctctctctctgtgtgtgtgtgtgtgtgtgtgtcccacagggtttctctgtgtaatagtcctggaaccaggctggccttgaactcactgagatcacctgcctctgcctcccaggtgctggggttaaaggtgtgtatcaccaccacccctgcagggccttaatttttcaaacattaagggaccctacattggcaagctctttcagagtttgacaaataaatatgtataaaaagaaatgaatatttgtattatacaagctgactgaatatgataatgtgagttaaaactttttcttggagatgtagctcagaatgtctagcatacacagcccatttttccatacgacttaagccaaaccaaaataaagagcagtcacatgttcacatggactagagtttgggggccagatatgtgtcacaagccatgtagtgtatttatgttgttgttccattgtcatcgtcgtggtgccccccccccaatatatcctaggaaacaaaaaaaaaggtatttagatcccttgacaccggagttataggcagttgtgagctgcccattgtgggtgctatgaactgaactcaggtcctctaccagagtagcaagtgctcttaaccgctgagccatctctccagcccatttgtgaaggaacagggtacatatagccaggctggtctagaactcatcatgtagcaaggctgcccttgaaatcctggttttcaccaagcatgatggctaatgcctttaattccagcactcttgaggcagagtcagtgggagaaaagaactaacttatacatgtacccatgtacacattcatgcatgtatatgtacatgcatacactaaaataaatgttactttaaaaaaaatttagaggctggagagatggctcagcaattgatagcacttgatctcacaaagtgagagcaacttgggttcagttcccagcacctgcatgccggcttacaagttctgtaactccagttccagggaatctaccacccttttctgacatctataggcaccaggtacacacatggtacacacacatggtacacacacacacacacacacacacacacacacacacaggcaaaacactcacatattattattcaagaaattcagtgaggagcaggagccaggtactggcagatcccctatgacttcaaggccaacctgggttatgtagcaagttccaatccagccagagctacctgttaagaaactgtctcagagaacctaaataaataattaaagaaagagctagtggatgcagagacccaccaccaaacattagacagaaagagaaccctggtcggaggtctccatcgggtccttccctccctttggagctcagggaatcctggaggaagagggaaaggaggaattgtggaagccagagggattgaggatactggggaagcacggccttcaaaatcaactaagcagggctcatatgaaggcttacagacactgaagcagcaataatggggcctacactggtctgagctaggtcccatgcatgtgttatggctgttggcttggtgttttgtgggggtgactctgattctttgcctgcttttggaacccttttcctcctaatggggttgtcttggcagccttaatgttaaggctttgtgcctggtcttactgtatcttgtgctgtgtttgtttgatggtgctgggaggcctgctcttttctggcgtgagggggtggtggcgttagtaatgtatctggaagaggagaggaagggaatgctatggtcttgatgaattgtatgagagactaaataaaaattaaagaaatatctagaaagatggctcagtggttaagagcacatactgatttttcagaagacctaagtttggaccttccccccccatctccctccctctcttactccctccctgcactgtagatccaatcccagatccttacatataccgcacaagcatcctaccactgaaacacacctccaccccgccttcagacggggtcttgctgtataatacccaggctggtctagaactctggatcttctcctgcagccttctaagtgctagattacagaggcatgccaccttgcctaatgtatcttaattaagtgtaccattcattggtgttttttattcatattgttgcatagtcattatcaccaccatctccagaaccctttccatcttttaaaactgaaactgtttccattaagtggtaactctctcacagggctggagaaatggctcagtgtaagagcactgattgctcttcccatatgatctgggtttaattcccagcacccacatggcagctcacaagtgtctgtaattccagttctagagaatctggcaccctaatacagatacacatgcagacaaaacaccaatgcacgttaaaaaaagatgtaaatggtaactctccaacctggcctgttgactcctctagaaaccttataagtagaatcatagcatttggtttttgtgtctggcttatttcatgtagcacatcattacacttttctaatgtgttaaaatttccttcaaggctaattagtactgcattgtatatttgtatgtgccacattttcccctgggggtgtgctgtttggtgtttgagatagggtattacatagcccagcttgcctcaaacatggcatataatggaggctgacctagagctcttttttgttgttgagacagggtttctctgagtagtcctggctgtcctggaactcactgtatagagcttgctggcctcaaactcagatccgtctgcctctgcctcccgagtgctgagattaaaggcgtgcaccatcattgcctgcttggccttgaattcttgattttcctgcttctacatcgcaagccctaggtgtactgacaatgtaccattgcctgtctctgtttctatgttttagctgttgtgaacaatgctgttaatgggagtgactgtagtaatataaatatcttttcaagaggctgcctttcagtcaggtgacagataatttttaaagtgagaaaatactcatctgtcccaggtgttatatagctggttaatgatagagaaacaggctgtagctggacatggtagcattcctgtaatcccaggactcagcaagtggagacagttctaggggtcaccttgttatgtgtgagactctgtttccaaataaataaataataagacaattgggtccctaaagtgattttgaaaatctgtttctccttctcccctctgccacagaaggtctccagaatgcttagcaattctagataaaactgtttaaaagaccatgggtagtactccagtccctgcattctggaaactgaggaaggaagattgatgcacgctctaggtcagcctgggctacatagtatgttcagtactatcatgggatacatagtgaaaccttgtccagtctttcctcactaagccaaagtaaagagctgatgttttattataggaaccggaagaggccattaaaatgagttttaaattcatttaaacccattttagggcttaaatcagctagattggaaggggtcagatacgaatcagaatagttaggactagttgtcattcatggcagaggctacagtaccatcagtggaggagggatatgggataccttgtcaaatatttgggagttggacagcagacactatagtacagttgtgtcagtggctggtgcttgagagacgtgagttccatcttaagagagctattaattagtgttatgtaaagttgacagtgctctgtttcagacagacagacagacagacagacacacacacacgcacacgcacgcgcgcgcgcatgcgcgcgcgcatgcaaccaaagtgaggaggattgtatgtgactaagaagacaagaactaacttatttcatgatagtaccgggctgctctggaccctgactgtggtaataagtgttcagttaggatgttaatactaattatgttaaaagcttgagatcagttagactgtggcagaggtagcctctgagaaggcagggtatttgtcatttctcatcatgtgaaaaatattaccttggtggagacttgaaacagatggtgtacagttggagtagactctgttattccaaataaacatttgctggaactggggtacagcaatccatatttcacttttccctatttacattatcaggtcagctgtgttgctgctgcttttactagcatgaaggttatcaacaggctttgatgttggcaggctgattacaacatgtctttaaatattaaaatgattagcactggaagaaaccctttagttacctactttctatactcagtggcataatggctattagcactaggtaacagcgtgtgtgtgtgtgtgtgtgtgtgtgtgtgtgtctgtgtctgtgtctgtgtctgtgtctgtgtctgtgtgtggtctcactggaatgatttgtctcaggttctgttgtatttaatcagcattagaaccaggcttcaggcacatctttcagattcaagatcagtgttgtcttccacaggaaaaaaaaatgtgtatggttttgatctcatgtatgtagtccattatagctcagacacccattgtagttgaagacctcgaacttgtaattctatgtgtgtacttgtatgttagatgaggtttctactgagctacatccctgtgcctttacatggttttctcagatacctaaatatattaatttccacttgcattgtagccagactggcctggataggaagtctgagctttggattaaagactgtcagctgatcaggtggagggtgacatgaaatgccaagggctgtcattagctactctccatccatcaaaaagacaactaatatcatggtcctcaagggggatggaggctggagctagctcagcttagatgcattgagaaagagctggttatgactgccaaacatccaccaactcccatttgcagcctggtgagtggggtgggcttcaggaggcgtggtctggctccactcacttcaaaactgagtattgctgtcccaccatggttattcctgggcagcttggtatggacaacagccatggctgccacagaattccgccggtctcaggagaacctgagggctggcagctcctaaaccaagtggcctcatgctggtaactggcaaacctgcaagcctctttggtatatagaacaaaaaaaaaaaaaaaaatttggaacacagataatttttgaagcttgagagcaggtattttggatgaagtgagtcaagaataggtctgaggactgagctccaggattctaaatttaagatgacaaagaagatgctaaaagaagtgcatgaaaatagcagccagggatatggggatgggggttgggcaccacacacgaaaaccaagtcaacagtatcctttgctggcctataagcaccggaagtgtaaactgtagaaaccaccactactctgaatgctagctgtttacagtatcataagggtcaggcacattagtaatacataccttcttaaaatttctgtgtaattctacccagccgtctccaggcagatgagactttttctggtctcgggtttttctagaaaagtggaggtggagcagagcctggaaataggcttaatccattgcttaactggttgctcttccagaatttctgagttcagtacccagcactgacatgatggatcataatagtcctctcttctggtgtgcagatggcagataaaatacccatatccataatcaaacctttttaaaaaataatttattttagaggcagttcactctgagttccaggccagccagagatacatagtgagactgtctgaaaatacactacactcctcattttatgtgagtgtggaggttacagaatgtattttctctttgtaccaggtgggttccaggagttgaactcagaccaccaggcttaagacacagcagtaaaacgtatttactttagaatttattgtatttgtgtaatatatacatgtaaatgtatttatgtgtgtgtgagtgttcacatgggacatccaaagtcctttattttattcctttgggacagggggtctcaccaaacctggaaccaggatagtggccagcaaccagtgatcctcctgtctctattcccccacagctcctcctgtttctttctgtttccccacactcctattactaactttcacccgttgctcttccatgtaaaggcacagggaaatgctggctgtaattcacagagaaggtcccagaagacacactcccccacactcaaacttgcagcctccagagttggtagaagtctctgttgcttaaaggctccaggttgtgtggcacttggttatgagcaagctaattgagcagaaagcattcccgtgaaaccggttatgttctttttccagtctgggaaagtgacatcttgttcctttttctttttctttttttttaaattttatttatttgcttatatgtttatttattgagacagggtttctctctgcaacagccctgtaaagttatgcgctactatcacacctggcctttcctttaaaaagagatttattgttgctgggagttggtggtgcacgcctttaatcccagcactcaggaggcagaggtaggcggatctctgagttcgaggccagcctggtctccagagtgagtgccaggataggctccaaagttacacagagaaaccctgtctcaaaaaacgaggagggggggtacatgttagtgtgggcactttgagtgtacttggtgcctgagaaagctaaaagagtagatcatatcccccgaaactcgagttagagaggattgtaagccaccatgtgggggctgagaattgaacttgggacccctaaaagaacagcaagcactcttaactggtgagctatctccccagcctctacacccccctttccccctctccctttcctgtcttattctttccttgtgaatttgttgtcttaaaggggctttggtttagagctctggttctcaaccttgctaatgttgagatgctttaatacagttcccatgttgtggtgacctcagccataaaattatttcattattacttgataactgtaattttgctactgtaatgaatggtaatgtaaatatctaatatgcaggacatctgataagcaacccccaaatgagttgcaactcacaggttgagaactactagtttagcttgaaaatatgactggaggtagttaagtgtgagtttccagaattaggagctggaaatgacagcaaagacatgtaaagccaagttttccatgggacaattatgaacaaatttcagaacttgcaaaatgattaaatctgggtgtttgtgaacatgttatttttcatctttggctttgtgacttacccaaagtaggcttgaaaaagacaatttgtgtaaatagttaaagctttctaaagggtacttagtatataatacttaccagctattttccactgatcataaagtaaaagcaggaacaaaacaacaacaacaaaaacagaagaagctgggtgtaacagtacataccttgctatatcagcgctcaggcctgcctgttttgtttttgtttttttgttgttttaatcagatctgaggctgtaactcagcaggaggatcagaagttgaaggcttcctctgttagatagtatgctctaggccagtctggactcacaggatgtacactcgtgttctctctctctctctctctctctctctctctctctctctctctctctctctctcaaaaaaaaaaattaaaattaaatgggtctgaaggacatggctcagtaaagttaagagtacatactgctcttgcgacaatcacagttcagttccacggcctctgatacctatggcttctacgggcagaggagcacatacctgcacatacagacgtgtaaaacaataaataaattctctaaaaataataagttattgccaggcgttggtggcacactcctttaatcccagcactcaggaggcagaggcaggcagatctgtgcgagtttgaggccagcctggtctccagagcgagtgccaggataggctccaaagctacacagagaaaccctgtctcgaaaaaccaaaaaaaaaaaaaaaaaaagttatttcttttatatacttgatttcttcatttttatgctagtaacttccagttataaactgaagtgttcttttatttccaaacttctgaattgaactacctactaggaacatatattggtttagagtcagcacaaaacttattgtcctgcaggtggagtggtgtacactttcaatcctagcactcaggaggcagagacagatggatttctgtgagttccagaccagcctggtctacagagtaagtcccaggacagccaaagctacatagtgagaccctgtctccaaaaaccaaaacattaatgtccaagtttcctctcctcaaatatactctaccactagtgttctctatcctggtcagtaacccattccactttggtgtgcatcctcaccccccgtcgtcttatcaacaaccagatcctctgcatcctaattttagtgtcttgtttgtttgtttttgtttttttgaagcagcgtttctctgtgtagctttggagcctgtcctggaactagctcttgtagaccaggctggtctcgaactcacagagttcgtatgctaccactgcccggctcttaagtttcttaaatccactctctcattccattcttactgctttttcaggaaatattgtatgtcacaacaggaaaactcacacataaccattttgcatcacagtctcatcatttccccatcaaaaacagtgatctcttcttttcctttcttttatatttcctcccaccctctccccaagtaatttttagagtaatttattaatatagatagatagatagatagatagatagatagatagatagatagatagatagatacagatagatagatatagatatacttgcatgcatgtatgtgtgtgcattgcatgcctggtgttcatggagtttagaagaggttgtcagatgctctggaagtacagtttcagatgcaatcatgtcgttgctggaaccaaaccctggttaacaacaattgctgttgttaactgtcttaactgcagagacagctttccagctcctatttatttttattgtatgtatataggttttgcttgtgtgtatgtttgtggaccacatgtgtgttttatgcctgtgaagccaaaaaagtgcatcggattccctggaactggagttaaagacagttgtaagtcaccatgtgggttctgggaattcaaacccaggtcctctggaaaagcagctgtgttcttaacctctaagccatctctctagttcctgtctttgattttcatagctttccttctaggtgatttttaatgtcactcatttacttgtgttgaaaaacaaggccttgaagggtgaaattatttgctaaattttatgtaggtcgtaagtaacaaggatgcatcaaactagccctttcactctgcatatctttattactgtttgaaactaggaattaacagtaatggtgctggtttatgggcagtggattaaacaaggagtgagtaatgtggtctgtgaactgtgttcctgaggcagattttatccactagctaagttttcaggaggtgaagcatggagctcagtgttttggagttgggctgacgcgtctttgttaccctggccaagtgcttgaatgttaaaactcatctatttgactgctaagccctctagcctttggcacccttgctgtaaagacaggtggtctgagaaaaaatgccctccagattgatgcacactatacataacataacagtgcgagacaactgtcagttccttcctactcttctccctcaccccctccagaaagctgggccccagatggaagagctggaaatgcgtcaactgttctctgaagggcattgagaaaacactggcaggaagaaaaaggcaagcgcaacagctcattagcccactaatcagataggacgaccatcattttcacaaagaaagcatcctgaccagggacagcaagagtgtgaaattttagcctcatggtttacagaatactgtaggttttgttagggggtttgtaacatgggtgcttgacttccttgacactttttattcatatatccctctctgaaatagagccactgcaaaatggaacataaaatagtatttggggacatctttcctatcacaaagtgtggtgaatatgctaagatgtgccttgtggtttatatgaacatgctggaatatgccatctttataactgatcctacaagaaagctttgattctaccttctcatttaaaccttttttgtggtctttgtacttgaaatcaaaatcagttgctactacagtatttaagttaaaaaaaaaaaaaaaacaacccatacaataggaattagtgagaggcatatagttcagtttaaaggtgagcctgttagccaggtactaataggttctcttttgtgagaaataatttattttaaatattttttgagtcatggttttgccacatttgatccagaatgttttatagctagagtgtggctttgagcttctgatcttcctgtttctaccaccctggtgctgggattacagccactgtgccaggttttatttatttataatttttagatttttcttatgtgtgtgttttgcctccatgtatgagaggccagaagaagctatgagattgcttagagctggtgttagagctggttgtgagctaggaactggacctctgtcttcttcaacctctgagctgtttctccgcccctcttacatttttttcatgtgcattggtattttgcttgcatttgtgtttggggggtggtgtcgtatcctctggaactggagttatagatagttgtgagctgccatgtggttgctgggaattgaacccaagctctctggaagagtagccagtgctcttaactgctgagccatctctccagcctccctctccccaatcttaaaaggtcctttccaagccctgcaaggtgtttactgccaagcctgaaaacctgaatttgatcacccggaccaacatgatagaaggagaaaactgactcaggcaagtttatcttctgactgccacacacatatcatagtgtggcgtatgtgggcatgcgcgcacgcgtgcacgcgcacgcacacacgcgcgcgcgcgcgcacacacacacacacacacacacacacacacacacacacacacacacacacacacacacaccaaatcaataaatatgtaattagatttttaaaaggtcctttccccaaataaagtagtattgccgagctagatgttaggacatgaacatatctccaggcagctaatgttttaccctttgttgtaagtatcatcttaatctctgagtcctctaggaaaataggttcagttccgattgctgttgctatttattatttatagagagctttgacctcctttattttattttattttattttatttttattctttgcagttggttgtgagaaaagggtgccagcaatgcctggatcgcctgtggaagtgaagatacagtcaagatcctcacctcccatcatgccacccctcccaccaataaatcctggaggaccgaggccagtgtcctttactcctacagcatgtgagacctttaaattgaattcctgattcagggtcataatgtagatttgagtaactggcttacattaaaccttcaatatacatcattcaacatgactaaaatataaataagggtatagtgatgcattcctataatctcagcctgtaatcccaggactcagaggatcaagagctctaggtcaccctttggtgtgacacatgcctttaatcccggcatgtgagaggcagaaacaagtggctctcagtgatttttgaggccagtctgatctatatagtgagttccaggccagctgagctacttagtgagggggctatttcaatatgactcccaacaatatataaagattggcatggtttttatttctttgtgacagagtctcactcactatggagctggatatattataatttgaagagtgtgaaaatagatcacacaatttaattttaaaaggctgtaaaagtttatctgtattgtccggtggctgcaagcatagtaatattctggtttttttgtggggtgcttcaaagagggcagctctgatcaggatagatctttctgtggaaacaaagatgaaagatggttgcagctaattttctagattggtgaaattaagtgttgagctattttttctgggaggttttagtaatctctttgactggaagatagaattaccctcccttcttcctcagcccattagtttttttatgaattcaacaccattttcctgaaaacctactgcctgttaggggatgatgaacaaagcaagagaatatagatgagatagctcagcaggtgaaggtgcctgttaccaagactgacaacctgagtttgctcctcaggaaccatgtggtaggaggagagaaccagctcctgtgagttatcttctgacctccacattcactgacatacacacacttgagttcacatgcacaccaaataaatgcattggtggtttacaaaaatctagtaatgtttatgtgttaaggtaatatcctttgagcagtctcacctggtgtggtgacatacacttgaaatgcttgagggaaaagggaagtagaagtctgaggcagaaagaactctagttcaaggtctgtctcagaaagcaaaaaccaaacagaaagaagaccagtctagcaagtaattgcataggtacaaagaaaagaagtaaaatagtggttgtgtgtgtgcacatttctggaactcattctgtagaccagactggcctcaaactcagagatctaccttcctctgcccctgagttttgggattaaaggtatacacaactacacccagcacaaatttattaaatccattagggtttaccttgaagaaggcgtagaggtggagaagggaagtataactgagtgtatgctggtcttcatactcatgaatggcggttttattagctaagtagtggttaaaagattgttgttttaaaacagagctaatgtcttgactttaattattttctgtactttgttgcttgcttgcttgatttttgtttgttttggtgtgtggtctcatgtagctcagagtggtcttgaactctttacaatccagcatgatcttgaactcttgatgtttctgcctccactttccaagtgccagtgagatcatgggaataggcccccatgccccactttgtttttttaagataggatctaactctgtagctcagactggcttccaaactagaatcctcttaacttgtctcctgagtgctggtggcatcactggtgtgagcccactacacctgccgtatttgtttatttgataaccctcccctctggacagggtctcactttgtaaccctgactatcacggaattcactatgtagactagcctggcatctaactcaacagatatgtgccaccatgctggcccttaacttgattagatttttaagcatggatatgattaggtcaaatcggattgaaacttaggtgctaggtaatcttgttttactattcagtcacagaggagacttctttttatatgtataggtgttttgcttgagtgaatgtttgtacacacttgcatgccctcagatcccctgcaactggagttacatacagtagtaagcagctgagtgtgtgctggttaccacacctgagtcctctggaagagcagccagtgcttttaacccctgagtcacctctccagctctcataggagaattttttccttaatgccactgagaatgtggctttagaaacaaagtatataagccaggtggtggcagcgtatgcctttgatcttagcacttggtaggtagaggcaggtggatctccatggtctgaggccagcctggtctacagagctacacagagaaatcctgtctcataaaaaccaaatgtgtgtgtgtgtgtgtggtccagtcctgaggtttcctacattaaaactaccaagaagtaactactgataatagcaaaaaaacagaaatactgattgttttatcatcatttgttcaaaaataaaggatgggaggtcctttatggagtttaaatagtgccctttcccccttttcttcttttgggtatatggggtcttgatacaccgatgcactggtttcaactttttgggcctaagtcactcttctgccttaacctctagaatagctaagatcactctagttttagaaggtatttttctgaatgatcaagacttttgcattatttgtcgatctgtgtcaagataagaggaaagctactctaaaggacattagtattttgaatggccaaagagagacattttgatgcagaattaggtcataaagatagacccttaaaatatctttgacgttagtataattctgtttttctggtatttctcacatactaacttgtgactgattgcttggcttcattgagattttcagaaggatatttgtaaaatgaacagaaagcttgatgtgtggtgggtcacacctatattaatagtattctggaggccaatgcaggagtatcgtagcaagttcaaggctactgtgcaagaccctatctaaaaaggaaagaaggaaggaaagaaagaaaggggtctctgagaaagatgactcaggagttaagggcactttttagtcttgcagaggacaggagtttgttttccagcactcacatggcagctaacaactgtctgttaactccagttacaagatctgtcttctgatccccatgggcatcaggcatacaagtggtacatagacatacatgcaggcaagacattcattcacacaaaaattagattttttttttaaagattttatttatttattatgtatacaacattctgcttccatgtatatctgcccaccagaagagggcaccagatctcataatggatggttgtgggccaccatgtggttgctgggaattgaactcaggacctctggaagagcagccggtgctcttaacctctgagccatctctccagcccccaaaaaattaagatcttaaagggaaaaaaaaaataaaaatatgagtttcagttagtctccaactcaccttaagcaccatggtgtctatagttaaatgttccttctgtacctttttttttccccccagaaggggctcacagtagccaggtgttctagaactcaatatcctccctcacccaaatgctgggattatgtgtgggcatcactgtagcttgctttttcctattcatagtgctccacgttgattgtgtgtgttgtgtctgcttgtttactttgtaaataatgttcttatttagtccttaagaatttccttcaatatatttttggtcatattcaactccctccccaattcctctcagatcccccccagctattcaactttatctcctcccaccccatctctctctttctctcttgtttcacactgttctctttttccctttccctcccccttccagtccagtttgtgatgactgactacttctgggtgtgggacctccctggagtgtggtttggatacactaggtattcctacattgaggaaaactaactgtcagcaagaaaactaacagcaagaatcatatgttgccaggcatggtggctaatgcctttaaatcccagcaatcaggagacagaggcaggggatctctatgagttctaggccagtctcatctacaaattgagttccaggacatctagggctgctgttacacagagaaaccctgtctgaaaaaataaccaaaacacacaacaacaacaacaaaaaccacaaccaacacacacacacacacacacacacacacacacacacacacacacacagaatcaaatgccaatagctacttggtggtggtgggactttgtgcccatctctcctctcttctatgcttaaattttgtctggcttgaacctgtgcttgcattcacaatctctataagtcaatatgtgcatctaccttactatatgtgagaaacagtttccttgaagacatccaccatctctggattttatagtctttctcttagatccctaagtcatgaggggaggagtataataataatagacaccatgtttagggttgagtattctgaagtctttttctctgcatgttgaccagtgttgggtttctgtggctatctgctacatgaagaagcttctctgatgaatgttgagtgatgcatttatctatgcatatggaaataaatcattagtaattttattgctatgcccatttaacaaataacagcaggttttctcttaggtctcatgacctgtctagccatagtttctggccccattgacaatatcacatacaggttctgtcttatggagcaggcctgaagtccattcaaaaagtgttgggttactcctatgatatttatgccaagcaggtctttattgtagctcacaagagttctgggttcaaggttgatgacttattttttttttcctccagtagcatgcatagcacccttttagtactctgaacactagccagtagagatgaagcttctggttaagtataagctagattttcccatatttgatgactcttgattggtgtctccatcagtagagtattacagacaagttctggagggtaacaaatagcattggcaaagcctttaatgtttgggcttggggtggtctctgtaactccattatccaacagctcaaaaagaggttacccagttttctttggtagtggcagctatgtagttggggtcttgttcccccatcatagagcatctctctctctctctctctctctctctgtgtgtgtgtgtgtgtgtgtgtgtgtgtgtgtgtgtgtgtgtgtcttctaaaatagtttgtgtgaccttttcaaaatgcccttaatgttagttatccttcccatgttccttctctaccctctcttcccatttcccaccccacttatgtacttagcacttatttacttgcttgctttaaatggaatgtcactgggtcactaaggctagcctcttattcctgggtatataagatctttccattgcagcccccccacccagtagccataactacaacacaagcacatatcaccatacttagattttaatacctgtacaatattctgttgccatttttcctgatagtttgtcttagtatgcagcagtctctctctctctttctttcttccttccttccttccttccttccttccttccttccttccttccttcctttctttctttctttttagatagtttctctgtgtaacttttgaagcctgtcctggaacttgttctgtagatctggttggcctccaactcacaaagatccacctgcctctgcctcccaagtgctgggattaaaggcatgtgccaccactgcctagctggtacacagcaatctcattgagggtggaaatgagtgtgagtgtgtgtgtgtgtgtgtgtgtgtgtgtgtgtgtgtgtgtgtgtgtgtgtgtgtgtgtgtatccagagagaaagtgagacagacagacagacagacagacagacagacagacagacacacacacaaacacaaacacacacacacacacacacataaataaatgctttacagaattcaaaagagtagtgaaagagactatatgtataagtcaataaagactcttacattctatactgagtcttctgattctggctttcttttagtaagcaatggcatcaaccattcccctcctaccctgaatggcgccccatcaccaccacagagattcagcaatggtcctgcctcttctacatcatctgcactaacaaatcaacagttgccagctacttgtggtgctcggcagctcagcaagttgaaacgctttctcactactctgcaacagtttggaaatgacatctcacctgagattggagagaaggttcggactcttgttctagcactggtggtaagtatggcttcaccttcgccagctgcctaagaagttgtgatatattcctgttcattcccaaaccatgtagatattctggactacactagttgtttcacaatttttttttaaaactgtcaaattatagatttcatagcagtatttatttgtcaaagaatctataatgtgtcttattatctaaggtgcggatttaattccagtgagcggctttggatttgtcttaaacagctttcagcaggcctgctgaagtccaaccgagttaatagaaggttgtttgtatgtcaacataatttagtaactagtgcaaaccagttttaattttcaaaacaatattttgtaaaattagaagtttaatggtctaaataagtagtttctatacagttatgttgttcagctccatgtgcatagttttagtttttctttctatactaatcatactgagcctgcttataaaggattaactttctatgttgccatctgggtgagattgagtcttctcaatttatgagggaagtgctgccagttgtcagtgtttccagatgaaatactgtaagattcactcctggtgaaagcattgtattctttcccacatgttaatttatgtttatgatgagaagctgagttattgtagtagtccttacagttgcattttctctcaaaatataatttaggaaaatccctggggttctccagtatactggatggcagggtatggaacacacttggtggagtgcttttctagtgtccacagccctgggtacagtcccagtattctgaatatctatgcagaaagactagacgttcaaaattatcctgagttttacatagtttcagtctagcaagtcagtgtataagatactgtctcttaaccaaatacttaaaagaaatctcctgtaggtcagtggtcttgaactctgtgtagtctaggacctcaaactcttgatcgcctgcccctgcctcattagtgtaaagattttaggcatgaactaccattattttgttctactgctttattgtaccacagtttatacatttttgcttctgataacatttgaattgtttgcatttggggcattgtgtcaggagtccctaatactgccgtgcatttgtagattggtttaccctttccagatttgacatatggtggtgctcacagctaacatctattccagaaaagtcataaaaatacacaggcagattgtaaaggagatacacatgggcagagtctggaggagtctgtgtgctggcctccttaatgttctccccatttcatgattacacagaacacactttccccaaaacaaagaaaatgtgtgcagtgcttctgcccaaagagtcctgtaaagatgctgattgttgctggatcttgttgaccatctatgtctatcttctcctatatggaatccaatgctttagcataaccagaaacagtaacagtgagccctttctactacttggagaaagtgtgaggtttttttttctgtgcatttatttatttagagcaaatctacttattagtcaaaatttaaactatgataggttagcattattaaattgagactaagttagctttttttttcaagacagggtttatctgtggctttggagcctatcctggaactagctcttgtagaccaggctggtcttgaactcacagagatccacctgcctctgcctctcgagtgctgggattaaaggcatgagtcaccaacgcccggcccaagttagctttttgttaagcttattttttgttgtatgagtgttttgcttgtatatatgtatggacaccatgtgtgtgcagtctcagaggatgccagaaagcatgtgtgttgggtcctttggaactgcagttacagaccattgtaaggtgccatatgggcactaggaattgaattcaggtcctctggaagagcagccagtactcataacattgagccatctcttcagctccaagatgtatttatttttattttatatgtgtgggtgtttcacctgcatgcgtgtttgtgcaccacagtgtgtagtgctcaaagaaccagaagtgttgtatcctcaggatctcttgcttgtgtttagtttgtcttcctcagcccagagccttaccagctctcacttgctctggtgctgtgtctatggcgcttagcggttgtgagagcccgttttatcacttttcggtttatagtgcagtatgttgtcattgttatgccatcgctgtcaccattactaccactgccattcatcatcagaactatttttatctatttggtttttctagattatgtttcatgtagccccagctaaattcactgtgtagctgaagacgatttatttatttatttgtttgtttgtttgtttgtttgtttgtttatggcttttcaggacagggtttctctatgtaacagcccttgctgtcctggaactcactctgtagacccaggctggcctcaaactcactgagatccgcctgcttctgcctcccaagtgctgggattaaagaccaccaccgtcccactgaagatgacttttaaatatttatttttctgcctctacctttccagtactggaattattatcatgtgccaccatgttcagcttatgtattacctaggggtcatattcaggtcttcatgtatgccaggcaaacactgtgctgacaaagctacaccccagacctttacatgattcaacaatgatgtaacgagtgtgattgttttgtttttgttttaagtcaatgtttatctgtgtaacagtcctggttgtcctagaactcaatttgtagaccaggctggccttgaactcacagagatcccctgcctctgagtgctgagattaaaggtaccactccaggttgaaaataaatgtttttaaaggataaggcatattctattatctgtgtgtacatttagtttacccatttgtcctgtatgaggaacactgggttgttgctcctgccttttcagttagggaaatttttatatcattttacaagttttgctatccacattctcagatcagctaatagtccacactttcgtgaaggcctggcttttcttttcccttttctttctatatattttttattgttttaatttttatttagtgtatgcatggtgtgttccagggttctggtgccctcttctggcctccacaggcaccaaacatgttacatgtacatacatgtagtcaaaactcatacacattaaagaacaataaatcttttttggtttacactgtatcagtgtgagtttcatgagatgttaacagtgaagatgagagaaacggcccattgcatgtaacctttctaagtttttaagtttttttttttttttaaagcttaaaaacgttacaattttatgtgaatgagtgctttgcctccttgtaggtctgtgtacatgtcaaaccagtatgcttaactgcttagccatctctccatcccttctaatttgtttttgcaactttgttagactaatttatctcaaagaatgtaaagctatgtatagttttgtcaataactccatcactcagtaagctgttctagaccagccttagtgccatagaaaaagcctatcccaccaaacaaagtgtgggggactatctctgtccttgtactttaatcttctaagtccattatagatgttcccctgagactaaatctaccaatatcctaccctttgaattttctgtctcccaaaaataaccatttctgagcctttaaaaaaattattacatgcagagcctgatgtagtaatgtatacctttaatctttgcactctggaggcagagtcagatggatctcttgagtttaacccagacaatgctacatagtgaggccgtctcaaaaatcaaaacaaacagataaaagaattacatctatctaatgtaagtgtgtgtgttacactcatgccactgtaaatgcatggaagttagaggacaactgcaggagatggaactctgatttacccattgagtcatcttactattaaaaataaaaataaactttctagtatgctttcctgctggactgtgcattctttagagagggagaaaaactaagctaaacaagaattaaatagttaagctctttgtgatttaacagttgactgaagacagtctggtatggcaactcatttctctgagatccagtctgccctattttgtctaaacatgcagcagccttgggtctgttcctgtggcatgagtcatttattctgtgctacaaatctgtattatcactttgtccatccatagggaaattttagatcattcttttggtctttccatatatgtaatctattttgctgctgtgcccagttttggatgttgaacattatttgtcttttcagaattcaacagtgacaattgaagagttccattgcaagctccaagaggctacaaactttcctcttcgtccatttgtgattccatttctcaaggtaattctgagaggcattcattgtaatttatcaacagcatctcctcaaaatctgctggtccctgctctgtgtgatctcagggcctcttactgtagttcactgtctttgttgtatttggggctagtaggtaaacagtatctacatcagcctcaaacatgatgagaattgcagtgctttgagtgatttctgtttgcaagcactataatcagcatacaggagcaagtgaaggaataaagagggaagaaaatgaagaaatcccactaagtctttggagtgtggtctgaagatgaaaaatatgtgttatctgagtggagaacctttgcaaagagaggcttatgcagttgtgtcaggatggtgtgagaaggcagtgcttgtttttcctcaaaccccagataatgcagtctaattaatgtcctctagaattattgtttctaaattatggttctaaattaccatcttactttcttaaaagtgttttcattttgaagtaatttcatgctcgtagatgagctgtaagagggtacagtaagctttccttatggtctcaaaccagttttccaaacagtagcacttcataatcatttcctatctttcttctgaaaaacaacccccccccccccatgggggttctctgtagctttggaggctgtcctggaactcgctttatagaccaggctggcctcgaactcacagagatccgccttcctctgcttccccggtgctgggatcaaaaccttgtgccaccaacgcccagcttcttctgaattttttaaaaaagaagctgtagatgtgatacatctaaatttccaaatctagaattttcttttcttgctactagggatccaactttgggcttgaagtatgccaaacaagtgctctttcaaggagttgtgtccagagtccttaaatcaagacgttaacatttacataacacttggtgtttaatgtacagaccttatttatgttttactagtctcccaataatcttctttatacaaaattaagcctttatgtgtgtgtggtttaataaattaatgtatgagggccttccttcccataatcattcaagactaaagactgaggaaaattctaaaatcttcaacctgtggcttactagatgattgagcacaaattcagttaactgatggctgagaggtgagatacagggagagagctagagagaatgcttgcataaagggttttgaaggagtcaggattggcctgggattggcatctgtccctgtctatgactcgctgtgtctctatgtcttcattgtccaggactcagtcacatggtatcacctaattacagcagaggatagaaaatctaggctagatgctaggagaaaagagcttgttacatggctcatcagtttctgctgcagatgctattgagggctgtttcttttcctcttgtctactggtcttctctcacacaactgaggtaggtatggggaggcccttaagacctcccactgtggaaataccttcttgtgcatcccactggtctagtctgtgcctttgctcttgctttttctactctgctaatatatgtagtatctgaaaagggcttgagggacaagtagtcactgataaggagcataacgaaaaaatgtgacatggcaccaaaacacacaaattgggggttcttgtctgcccagagcaccagtcctatcatgataggtagttcctgcacttgatgccctgaaagagtagagcttttgtgtgaaatacttggtactaaatgcttctttctgacatctcagaaatggagagagaaatacattcagaaagacttgttttgttttgttttgtttttgtgttttgttttttagaacatggtttcactgtgtatcccaggctgtcctagaactcactctgtagcccaggctggccttgaactcacagagatccaccctcctctgccttccgagtgctaggattaaaggtgtgtgccaccatggctctgcttctttagtgactgtggggcacaaggtctgggtctatatttaatcatggtccctcatggcatgtagtattaatttgtaacagtttctcaacttttaatgagtattatagctttgaataattttatttttaatcatgtgtatgagtgtctggtatatatgtacatgtgattgttgggtgcctgtggaggccagaggagggtgttggatcccctggactaggtgctgggaatttaacttgagtcctcatcaagaacagtgttctttaagtgtgagccatctttccagccacaagagtgtcatgatttagaggatgctgattgtaaagaagctcagcttgcgttgttctggaactttctctctttgaagcttaaagtcatttgatatattttagttaagaattgcaggtaagctgggcagtggtggtgcacacctttaatcccagcactggggaggcagagtcaggcggatttctgtgagtttgaatccagtctggtctataagagctagttccaggacagcctccaaagccacagagaagccctgtctcgaaaaacaaaaaagaagtgcaggtagtttagggtatggtgttacatgcctataatcctggcatccaagaggcgcaggggcaggagtactgcccctcctagttcaaggccaacctggtctatgtagcaaattcctggctaactaatagtacatagcaagatcatctaaaaaaacaaaaacaaaaaaaaatcaacaacaacaaaaacaaaccaaaaagacaatatatttgtataaataattatcataactttaaaaaagggaaaaaaagaaaattgcaggaagtggtaaccctgcagggtggcccaggacataggcagtgattggttccatcatagataatgtcttttctcccccttaacaatttagcaaaactgattttctgccttgacttttttctataaaattaatatctcctctgattaaatgattgttttcccacatggcatgctaacacaagactgcagtcctagtaattgagaggcttcaggtagaaggatcacaaatagtagatcagtctgggctaaagaggtcctttctcagaaaaaaacaaaaaacaaaacaacaacaacaacaaaaaaaaacaacagaaaagtactactaggacctggaatttagctcagtgatagaaaacctacctgtcatacacaaggccctgagtaaattactaccagtttaaaacaattaatagtaaagattactttcccatatgggaactgttagcacatgcctttagttccagcactctggagacagagaggcaggtgaatctttgtgagttcaaggccagcctggtctacagagtgaccaggacagttccagaacagccagggctgcacaaagaaacctgtcctgaaaaacaaaacaacagcaaaaagattattttttccctaataggtaacatgaacatgtatcagatatttcattgagttgatgaaggcatctgtgagacttcacagtcattattgcttaataaataatattcataggtcacaattaatattttttaaaatatttttaatggtgtgtgtgtgtgtgtgtgtgtgtgtgtgtgtgtgtgtaaatatgcacttgagtgcaggtgctgtccagataccagaagcagtgttctgtgttgtggaactggagtttcaggcactttggcaatctgaccctgttcccctgtaataacagcaaatacctttagctgtggagccatctctctagctccacagttcacagttacagataatgactgtgtaaacacagaactcattctaataagtggcactttccagaaacaattcatgtgaaatataacagttgttttacttctgtcagctatttttaagtcactcacagaatagctcaaaagaaatgaaagattagaattttgttgtcaactagtttgaacaaatctagcataccatttggttttgtaacactgagaatgctgtatacagataaacatttgcagttgacttaatgctgaggaatacccacttgaaatttaattaaactaaatattacccccttctccctgaaaaaaaccttactgttactttcattagtagatttgtactacaaaatttactatgttcaattaacatattttggattttatttttccacctatgagataaatccttacaattaattcttggtggctgaaagtactgtatgacctttgtcagccctggagtagctatgctgcttggaccctggttgtctttgtcttgtcttgtcttgtctgggcttttttttttttttttttttttttttttgtttttttttttttttttttttttttttgttgttttatattgcacagggttttagccctggatgtcctggaactcaatctgtagactaggcaggcctcaaactcacagaaatccatctgcctctgcctgtcaagtgctgggaataaaggcatgtgccgccaccacctaggttgtcttttctttatatctgaatttacagacaactattcaccgagaccctacaattaaaaaaacagtttatgaaatttgtgttaacagaacataattaactatgtttttcctgtatgtcaccaaaggacacacgtcacaaatataatgatttgacatgtttcctttttttaattaagtttttgcagttgtaagattgcgattctagaccagacttaagaagtgtttcatattgtcagattctctattcttaactgtgttatttggaaaacagcatgaggtaggttgttgcagcagctttttggctagcatttgaggttttgtcaatttatttctgctttaaaacagctactaattatggtgcctgctcagtgagggggtgactacttgcatgtattaaaactttttatttactcatttgtcccttgaggtaaaggcattcattataggcccctccctgaattttagggaaaaaacatacaactttttgatatatatatatatatatctgaagtttgtgggtttgtttgctttttatcctttgtttatttttattttattgcattggtgtttgcatgtatttctgtgtgaaagcgtcagatcttggagttacatacagttattagctaatatgtgggtgctggggattgaatctgggtcctctggaagagcaatcagtgctcttaacctctgagccatctcttcagcctgttttgttttgttttgttttttgttttgtttttttatctaccaaaagttttctaagtatgagaaggaaaaatagcagaacataaatttccttttccagattacattattcccagcactcctcttcaaaactgcatttccagagtaatcctggtttccaggattccaagatctctccagagagccctcagagaaggttgagtgccaccatcagagagtggttgtgattcagaagaaataaaccagagcttgtaattctccattttaggcagtagtaattctcttaactggccagtcttcaagaaaatgtgtgtgtattttgggtgctggatatgcagtttagtaatagagtgtttgtcgtgtctccatttggtcctaatcctattgcccagacttttgaaaatatatattttatggctggaaaggcaacccagtggttaagagcgcttgttgcgttttcagagaacctaagtatgatgtacagtaccaatagtaactccagctacaggacatgtgcacttacatacccaaacacaaaaacacaattaaaaataaaagacatcttgaaaaaaaaagaaaaatgtatatttttaaattctgtgttcaacaaacctttattgtgctctgtatcatcaggccacggaagtagctaagacacagtccctttaagaagattggcatcttcctttggaagaaacagatcaaccaataacttatataaaaatgcccctttgctactttgatgtcattttacttgtgttagagggagaaagcaaagagggctttttgtctgcaagagttgttgagatgctaatctctgtaggtagggctcagcagatgggaaaactgcctctttcttttcaaggccaacctgcccctgctgcagcgagaactgctgcattgtgcccgggctgccaagcagaccccatcccagtacttggctcagcacgagcaccttctgctcaataccagtatcgcatctcctgctgactcttctgaactgcttatggaggttcatggaaatggaaagaggcccagtcctgaaaggtgagcagagaagagatctgttctattttcccggagctactctttgctttaaaagaaaggaggtttggttggtggtttgtaggcagatacatgtcttagactttccaagattagcttccctttgtcccagtgactgttcaggtaactaactgcacattcctgttgagaagttctgccctggagtttagacatgaagactcagctcctgtgattgtccagtcccttcagccaatgacaagtcttaggttatgattgtgaagaagcaatattatgaacaatagaaagattactacagttgaagctgagtgactaaaacccctaccaagtcatagaggctgttttcttcccagtagctgacctctataatgacagatttgaccttcagcattcctaaaccttgtcaaaccttgtcccattcagtttctcctgtcctgtgtcatgattagatggttctgctttctggacctctcttcttcacactggaataaacaaacatttacatattgtttctggcccctgaagacagttcggttcatgcctcttgttaagccattcctgagctgggtacgggaacacacaccagaagtcacagctattgcagaggcactgaagtcagatctctgaagtttggctgacgaccagcctgagtatcatactgacttaagggctgatggtctaccagtatgaagcatgtgtgtagcatgtgggctgcagcaccaaaaatcaataaccattctttgaagacttcctgctttgtaaagtacatagtatgtgaaggttgggtttcctatgaggtgagttgctgggaagaagctgctgtcctgagacttggtcgggatgtgacatgagcacttcttgataggcacctataagcacttctgattcttctgcaggagggaagagaatagttttgaaagagatacaattgcttctgaaccacctgccaagagagtgtgtactatcagccctgctccccggcacagtcctgccctcactgtgcccctcatgaatcctgggggccagttccatcccactccaccacctcttcagcactatactttagaagacattgcaacttctcacctgtatcgggaacccaacaagatgctagaacaccgagaagttcgtgagaggcaccacaatctcagtaagtggtcgcagcagcatgacaatgctttaatctggagggaatcatgggttgcttcctattcagtgaaaagcccagtaatatcatgattgcctttttctgttaagatgatgttgtgcagctggacgtagttccacatgcctgtaattccaacattatagaggctggagtttgatgatcagctcagggtcaccctcatcctcataaggagtttgaggctagcctgtgctatagacccccccaaaaaagaggactgggcatggtggcatacatattagcagtcaggaaaatagcgtggtttacacgagtctcaggccagtaagagttgctttgactctatgtgtgtaatctgatggaaattgcttagcctcttgagcctgagagtgataactttttttttttttttttttgccatttttctttattgagctatacatttctcccactccccttcactcctcccctctccccttccattcttctcccaatactcaggagatcttgtctatttccccttcctaggtggatccatgtatctctcttagggtcctctatgttttctggggttgtggcctgtaggttggttgtcttttgctctatgtctaatatccacttatgagtgagtacatattatatttgtctttctgggtctgggttacctcacttaggatggctccttctagttcagtccatttgcctgcagatttcaagatgtcatttttttttttttttttttttttttttttcccactgagtagtctccattgtgtaaatgtaccacattttccttatccattctttggttgatgagtactaggttgattccaggttctggctattatgagtaatgtgctgtgaacatagttgagcaaatgtccttgtaatgtgagtttgcatcctttgggtatatgctcaaaagtggtattgctgggtcttgaggtaggttgattcccagttttctgagaaactaatatactgatttccaaagtgactgtacaagtttgcactcccaccagcagtagaggagagttcccctttctccacattctccagcttaagcagtcatcagagtctttaatcttggccattctgacaggtgtaagatggtatctcagagttgttttgattcgcatttccctgatgactaaggatgttgagcatttcctaagtgtctttcccccatttgagattcctctgttgagagagttctctttttagattatttggtctttggatgtctagtttcttgagttctttgtatattttgaagatcagccctctgtcagatatgggttggtaaagctcttttcccattctgtaggcaactggtttgttttgttgactgtgtcccttgctttattggagcttctcagtttcaggaggttccatttatttattgttgctctcagtgtctatgcagctggtattatatttaggaagtagtctcctgtgccaatgtactcaaggcttcttcccactttctcttctatgatgtttgatgtggttggttttatgttgaggtctttgatcattttggacttgagttttgtgcatggcgatagatagggatctatttgcattcttcttcatgtcaacatccagttatgccagcaccatctgttgaagatgctttcttttttccattttataatttttgctttgtcaaaaataaggtgttcataaatgtgtggatatcaaggtcttcgatttgattccattggtccacctatctgttttttatgccaataccaatctgttttcattattgtagctctctatatagtagagtttgaaatcaggtatggtgctgcctacagaattcctttattgtacataattgctctggctatcttgctttttttttttttttttttcctgtatgaagttgagtattgtcctttcaaggtctgtgaaaaattgtgctgggattttgatgggtattgcattgaatctataaattgcttttggtgagattgccatttttaccttgttaatcctgcctatccaagaacatgggagatctttccatgttgtgatgtcttcttcaatttctttcttcaaagacttaaagttcttgtcatacagttcttgaaagtaataacttctgaaatgaatgaagatagtattaccatctctgcttttttgttaggtttgaaatgcctgaagcataggcctgtgtaactattaaatttaagaataaacactcccattttaaaaacccacagtcctaatttgagatcagtttttgaaaagagctttttgtcacattctcttttgtaaatgaatctttagagtttaactcctcagtatcaatcaggcagggaaataaacaaagaaacaaataaatgaaggctgccgtcttgatgggtttctgttgcattccatttgttaggggtacctggtagaaaacacattaactttttcccatttggacctaagctgactagcattttcccaaggcaaaaacctcaccagggcctcatgttttatgcaattcttactgaatggtaaaggccatgagagcattgtctccatacatttactgagtctcagctaccacaaattatttgatttagtctttccagaaggtctggacagtcattaatttcttcatacagaaaggatcaaagcaactgtggccagtgtcacataactaatgagtggccttgacaagattcagttcctaagctgcctgatgttgaggttggctacattggcaacatgtggtgatacataccattcttagtgtccttccatactgtctcatgccttttgtttagcttgggggtcatcaagatggctcagtgaaaaaaagtcacttgccatgtaagcctgggtcttgagtttgatgcctgaagagaattcactccataaagttgttctctgacctccatgtgtcatcatagtcaacatcatcatacacatacagacacagacaataataacattaaattcgttttcagaactagtcttgctattgatttttttcctcttcatacacagtttctgtccatttgagaaagaagaatggtgaaagctaggtgtggggtttgaaagaaaatggcccccaaagggagtggtactgttaggaatgtggccttgttggagaaagtatgtcactgtgtgggcaggcattgaggtctcttttgttcaaagattccctcagtgtgactgtcagttgacttctgtggcctgtatatcaagatgcagtcagcatgcagtctgcctgcatgcagtcttgctccccactatgatgataacggactgaacttttgaaactgtgagtgatccacccaattaaatattttctttataagaattgacgtggtcatgtcaattgctctgcacagcaataaaaaccctaaggcagtaggtataaatgtattttgttaaattttacttgtatctctaatagttttaggaaaactatgtatctacatctggaattgtactttgagattgttggtcacctaccatgtttaattcaccaggttcatcaaagattcctttgttttccttagacctattaggaaatgtctgccctattatactggtccatattcaccaatctatcacatgcccctccccctaatcgaatcagtaataagtccactcccctttactcgcctgaaatgaaatctgtgggcacaatctatagcctaccttatatctctaaatttaggatctatagtctatccaaaatataaaaaagtatttacaataaaatgtagtagtgcttagacattagaagatagcaatgaaagatagtgtttagggtgtagctcagtggtaaagcaaacttgcatgtgatagagttaaaggtgtgcgctacaacacttcttagtcagggttcccttgctgtgaagagacactggccacagcagctcttataaaagaaagtctttaattggggcttgcttgcagttttagctgtttggttccattatcagcacagcaaaaagcatggcagcatgcaggctaacatggtgctgagaggcctatatctggatctgaaggcagcaggaagggagagagagccactgggcctgactttgctgtttgaaacctcaaagtccattccccagtgacacaccctctaatcctttgaagtagtaccactcactctctggtgactaaacattcaaatacgtgagcttgttgggccccttcttattcaagccaccaacagagtacttctgatattttattttccaggatgttggatatgaaaggcttatgtgaacaaaggaaaagggcatagcccctaataacttagaagatttgctatccttagaaggtgtttatgctctgtctgtacttccttttctgatatgacctgttgtgtttgtttttcttttgggatttgtctttacaactgaattgataagagtttgggagttgtgccccaaaagtgctgggaatggaacccaggtcctagtgcatgctaggtaaacattctgtcactgagctgtacttctagtccctggagttatttgatctgaatactaactctttattggttaacattaatggttgtgtcatttttgtgggtctcacaccaggtatggtaacttactcccttggtagtgtgctctaagttgacataactgtgttgtgtacacttgatagaattcagttgctctgcattctttaaatataatttcttgtttctaatagatctgaatggaggctatcaagatgagttggtagaccaccgtctgacagaaagggaatgggctgatgaatggaaacatcttgaccatgtaagaatctcagcatgtttaatttccctaagtccttattacttttaaatctttatagtttgttttgctttttgtttgtttgggtttgtcgtgtatctgtgtgcacatgaacatttgcatgcatgcacatttgtggacatgccatgacttgaatgtggagattcagaagaaactatttggtcttgttccttagcagaaaggtccctttacattcttaaccatgttgcctgcccacttttgtttttactttcctattcaggcatgcaccactgcatccagctcttttaattcttattgctaccagtagttcatgtgtgcttgaagtgaacatgacttttgaacagaagttgatttgttcaccacttctcaggtgaagagctgcacagtcactcccagatcttggtggtagactggtccctccagttcctaaaacaggtagtcgtggaatagatggttaaagcaaagattccagttttgccacttgttgcctttgtgagctcaataaattactctacctcttttagccttgattttttttcctttaaaaataaggttcagtgatatggctctgtgggcaaaggcactttgcctaagtttgattcccaggactcacatggtgggtgggggagaaccaactcttcacaagttgtcctctgactttgctcatgggccttggaatgtgcacatgaagacacataaacacaccactaaaattaagtaatctttctcctctttcaaaaaaaaaaaaaaaaaaaaagctgggcgttgggggcgcatgcctttaatcccagcactcgggaggcagaggcaggcggatctctgtgagttcgaggccagcctggtctccagagcgagtgccaggataggctccaaagctacacagagaaaccctgtctcaaaaaaaaaaaaaaaagaagaagaagaagaagggctgataaggtggcttagtggttaagagcactggctgctcttccagaggtcctgaattcaattctcagcaaccacatggtggctcacaaccatctgtaatgagatctggtgccctcttctggcctgcaggaatacatgaagacaaaacactgtatgcataataaataaatctttgaaaggaaggaaggaaggaaggaaggaaggaaggaaggaaggaaggcactgccattatttgtaataacacataaagtgtttattatggagtgtggcacacatggaaagttaaacaaatccaagttagaattagtatgctgttctctttcccatcagagaagagcatctcttctccctgaaaataggcagtgcctacttgaaaattgcatattgtggtttacttcagatattattactgttactatcatcatttgaccctggtccttacctagggggtaatgtattcatgtgtgtgtgtgtgtgtgcatgcatttgtctgtcacagagacagccccagattgtattattatagaaacatctagctttatctaatgataccaggtattcaagcctggtgaaaaattctaactcactgagctgttagcttacagaccagcagtttttctcatatatatatatataaaataaacgattattttgtgtatgtagttgtggtggtggtatgttgtgccacaatgagtattcaggattcagttctctccttctaccttgtaatttccagagggtagcaagtattccttacctcttgagccatgctggcctgtataaagacttttttaaagtcacataagtatgtgggtagatgtgcacaggatatatgtaaatgccacaccttttatataagggaattggagcacttgtgacttctagtgttcctggaaggttctagaaccaatacctctgtagttgtcccaacccttgggacagcagtctagggcaagatatccagtgggggaatggtgacaagagatgcaagagaatgaccacaagacaggattttgatcaagtggcaacttttattttttccaggctagcttatatagtcagtagtatagggtaaaggggagggggagaagaggcctagagtcaggtgttagttcaagcaggatgttagaaaattatagaaggaggatattggcagggtaataagttcatgggtggtggggagagggaggtttacttaggtcagtggttgggacttgggagggttgcttaggtaagtgggcctgtggttagaacaaagggtttgacgtctggatcatgttgttccttctgggtgctcatgcttctagaagccatttataatcaaaagatagttctataaccgtgtggcgtgccaagtttggcctaaaggtttatgccaagctgtatggctcccaacatacctccatggataggaaaagatagctgtatatataaaataaaaagatataaaagggactcagtggttaggagcacttgctgttcttgcagaagatccaggtctgcttctcagcatccacatggcagctcacaaccatcagtaactctagttccaggggatcctgttccctcttctcatctctgtgggcaacacataggcacatgcatttgtgcagaccaaatactagcatgcataaaataaattaattttaaaaagcaaggaataagaatgactttcaaatgtaacctttattcctaaggttataaaatctgtgagtctccccctcccgcctcccagtggtttgtccatccttgatcttcactgtgccttgtttaagtgtctcatctctgcctcactttctctctggctcaggccctgaattgcattatggaaatggtagagaaaacgaggcggtccatggcagttctgaggcgctgtcaggaatctgatcgtgaagaactcaactattggaaaaggcgatttaatgaaaacacagagatgaggaaatctgggactgagctagtctccagacagcacagccctgggagtacagattctctcagcaacggtaaggatagaaagaggtaccctagaaggaacagcaactttcattccacttaaacatcagatagatctaagttcattgttattctgaagcgcttgtttggtttgttttttgagaatcttactatgtagcttagactagccccatcctcttgcctcagtttctcaagtgctgggattaaaggtgtgcaccaccatgcctaactacatctatttagttgtgtatgtgtatttgtgtgccatgtttatggagggtgttggttatttcatcccaccatattggttctagggattaaacttctttttttttttttttttttttaaactggtatgtgtgttgggggatgtcagaggacaacttacaatattcaatattctttatacaccatgtggtttccagggattgaactctggtccttatcctctactacaaaggccgttacctattgagcctgacttctccctgccacattacatgcaagtttgcaagcctcaggttcttctattcatgttctgatctgctgaatatcaaccatgcttcccataattccctctttaggtttgattgatttgctcaagctgctcacaggctcagggaaccaagcttatctgtttacaaatgacacacatgaagagatacaaagcacaaggtctaggggaaggaacacagggcttctctggacctgccacactcagaaattgcacatttcagctaaccagctttctgaatcctgtgccttgtggactcattgcagttgaattacagtagactggatggggaagtcaaggaaggcttgtgtgcatcagtgctgttctgcagcactccttgtctaggtgatgggggagacccaccagtatagtatagtatcagacaagggtacattcaaacagttttgttactttagggtttagttttattgtgtgttttctgagatgcgttctcactctgtaatctaggctgacctcagacttgcatcagccctgccttaggtgagattacagcatgaacaatcagcaaatcctatggttttgttatggccagtcccaatgtagaaagctttggttgggggaggggggtgaaggcaagagtaagaggaggagaaattcaggcttgtatggcctccagtggaggaattgttagccagaaacaatgatgacatctaaactttggtgactggggtgttgcttaatgatgagtatttgcctgtcttgacctgagttcagcatagcaatagcagagatcagcaagggagaaagaaaagagtaccagttatgtatatcacatcttaactagatactttgatggctgcactcaccatattccttcttgatggtattcaccccactttgctttctttcctcaattactctccacttcctggtagcttccttcaaaagattagcttaggcaaaactgggttgcacatcttgatgcagcagagatgagcttatatccaggaagctagagttatcccccagaatgttccatcacttttacccagaagctgaaaaggtgccctatccaaaggcacagctgaatgacaggccatctgtgatcacactctctccacccacccacttaaagttcccaaatgttcatcaaagagaatgaatttcttcttatgacagtgctagcgtttttcatagaagacagctgttagtctcaaaaggactggaagagaattttgaggaaatgccagcattaataatgtgtgtcctatcctaaatagctaagggctaccactttctcctttaattgacaggcgtggctcttgagccagtcatcaattggcaccattttatataggatatctagtatatcaagaaacaatttacaatcgagcacacacgtttgatttaaaacgtcaaaaaacaaatgaggctaattctcgggtcactctaacaaatctgaaccttaacaaatattccctaaagcaacttagagatccttgactaaagatcaacatccacagtcatacattccttccatgagtatgcatgtgtgccgctggggtggcagagtgcaggccagcagcactcagtaaaactctgctgtgctctgtacaaaccactctaacttgagggtctagcagggacgacccatattgtctggtgtgtctaggacggtttttattatttttatggtccatcaaagtcattacaagcacctctctttcaagatgaagacaatttgatgaattctagtcactctagatttagtgtttcacggactcctattaagagtctgagaacattgccagcctgtctgatttcagttgtatcatttgtctgggatacagtttagttgacatagtgtttacttaacaggcactaagccctgggcttagtccctagcaccacaaaaactgggtgtggtcttagggcacactgtgcttacaacaagagtttcaaaagttaattgctagtctgaacttcatgaaaccctgtctgaaaggaaggagaggaagagaagagaaaatggcagggtaagggctagaggaatggctcagcagttaaaaatactaaatacttttccagggggcaggactttaggtggctcacaaccatttttttttttttttttttttttttttgagacagggtttctctgtgtaggtttggagcctatcctggctcgctctgtagaccaggctggtttggaactcacagagatccgcctgcctctgcctcccgagtgatgggattaaaggcgtgcgccaccaacgcccagctttcaccacttttaacttcagcttcaggaaatctgacctacctaagcagggcactcatgcagactcaaattcatacacatgtagtcagactttttgtcgggaccattggctccccaataatgatacacagacttatgaattataaaagcttggcctatagcttaggtttgtcccactagctcttataacttaaattaatccatttctattcatctacatgttgccacatgactcgtggcttttacctgtcctgcatgttttgctccctctccgtctgaatggcaactccacctttcttcttcccagcactcaatctgttcagaagtccctgctatacctcctgcctagctattgactgtaccagtcagatagacgcatcttcacatggtgtaaaggaatattccacaatacaacacacacttaatgaaaatcaattataaatcttttgtttgttttggtttttgtagatggagtttctctgtgtagccttggatgctctggaacttgctctgtagaccaggctggcctcaaactcacagagatttgcctgcctctgtctgttgagcactaggattaaaggtgtacatcaccacttccaggctaaatataaatcaagaaaaagaaaaatacaggattggttatgagtggcaatgcctctcctaaatgaaggaatggggtatttatatcatacagtatttaaacatactaaataatgtgtttctagataaatagggtttatttctctttcagtgtgtgtcagttttagaaggaaagcagaattcacagggtggactaaactgttgcactggagtgtattgagtgtattgtttgctttaagaaagtctttggctggcatggtatatgacttttaatcccagcactctggaggcagcagaggacagcctagtctacatagagagttctaggacattcaggattacatagaccttgtctcaaaaaaaactttttaaattttttgtttttttaaaaaaacgtgtgtgattgcttttatgcctgccgggtatatgtaggggggggaggggtacatgtgctataattacctgtggaggtcaaagaacaatttctgagagttgattctcctttatttgggctccattgatctaacttggtttatcaagcttgcatggcaggcagttacctattgagccatctctctatcaccttttttgtgtatgtgacagggcctcttgctgtgtaaaccagttgatttttttaagtgctacttttgtttgttttgattttgagagaggtctctctgtgtagctctagctagtctagaacttgttatgtagcccaggctggcttcaaactcaaattgatctgcctgcctctccctccttcatgctggaatttacaagtgtacactaccatgcccaattaaatgctattttacaagtaattgcactatgaaaggtcatatgcaacagcactctgaaagctgaggcaggaggattttaaatttgaggccctcctgagttgtgacatactaaaactttatcccctactccaaaaaagcccagatcatataatgcaaaaagataaaattgtagaaatactttctcctccttatttttcttatagattttcttatagggtcacttactaacaaattaatgttgtcttacaattttttctatgttcatatttaacagagttcccccagttttttattttgacattttcagtctaaatttgttagcaaggcctataatcccagttactagagaggcaaaagcaagaagatgagtccaaagcttgcctgagctacagttcaagggcagcctgagtaacatgggaacacttttttctaaaagtaacaaaagtgagcctgggacttgatctctagtcaagttacactgaattcatgtatataatgtcccaagttttatatggcccactggtagacccacccatttatcatgaacaagggcctaggtttgatccccagcaccacaaaaaatttatgcttacctacttaaatataaagttgagtatactgtttcataatctgaagctagctcttattctgaatatgttttgcattaaataagcatacaggtttagatctaggtggtaaatgagaagtctgataagaaattttgtgtcagggttagagattattcttagagcatttgcctagcttctataagaacttgggttttaagtactgggtaaagaaagcttctgaccccttgctctttatctcttatgtagattctcaacgggaattcaccagtagaccaggaacaggatatgtgcctgtggagttttggaagaaaacaggtgtgtatctgtctgttggtaagcagtctgttcttactagtttatgcaagttgggaacccatatactagggaaaggttcataaccagcttttaagttgtctacaatgtcctcctcatggaattgttgtcttctattctccctctggctcgtctgcacgtctcctggactgaattgcctgcctgatccttggcaggtcaggagtttcgaatgggtccctctgggccttttaacgcccttctacaggcttccattgaaacatgaagtacctagctcttctttcattttgacaaaagttgaatttatttctgcttggtctctttgctgatatcatactgtgtctacattgtcacaacatttgctgaattttgatttttttttttttaagttttcttgtttgggaagcagaaatagaagacttgccaaaagtttgaggctagcctaggttatatagtgagaacttactaaccctgcctccttgaaccctactaccctccaatgttgtgggttgggagggaaaagatttctctgccagttgattttactgttgctttcttccagaagaagctgtgaataaggtgaaaattcaggccatgtcagaggtacaaaaggctgtagctgaggcagagcaaaaagcctttgaagtgattgcaaccgagagagctcgaatggagcaaaccatagcggatgtcaaaaggcaggctgcagaagatgctttcctggtcatcaatgagcaagaagagtccacagaggtcagagctatgctgggctctgggctgggctgggctgggtggctgaaggggagcaagcccattgcttgctgctgaggtgctgggtccaaagagtccactagatgatgggagttttagctaataccagacgacttttttcttgattgaagatacaccaaaataataaatcatttttttggaatcattatagtctatcacatactcacaatatattgcttcagcttccatgaaggcagaggtttgtcccagctgtagttgtagtgggctcattgtgtgcagacagatacctagctatgtatgtatacttccttttaatcctcacagtaatctcattatgtagatgttgattctcagtttatagaagtgacagatagatagactgcccaatgccctatccagggcccaaaattgggtgatgcttcaatacaatgaaaaatccaagtggacacaatgtttacacacctgtaatcctagcatttaggaggctgaggcccgagaatttagagttcaagatgagcctgatacacataggggaagatgggtcacaaagacaaaaaataaaaataaaaaattctccaacccaccacccatctctcagtactgggcattaaatttatggccttgggtatatttggcatcccaatcttttcttgttttattttaagacatggtctcactgagttgataaactcagcctctagaggagatgggactgtagatacatgtgttcagccctagcactagaatatttgaattcagtgaattttgttttatttttttgcatataggatctctctgtgtagccctgactattctgaaacttgctatgcagattaggctggcctcaaactcagagagatctgcctgctcccaagtgttaggatcaaagatgtacgccaccactcactcccagcctgtaactttcatttagtcttgtcctttttgttgttgttttttgttttttgggttttttttttttgtttttgtttagttttttggtttttttgaaggatggtagatttttgagacaggatctttttatagcccagtctggcctggtactatgcaatcctagttgttattgggagatcagtccttttgcctcagtctcctcagtgcagagatttatagatgtgcgccatcatgccaaccttctcatgttagtcattctttaggtttaaaatataattttaagcagcaaactaaaagtagtctgcaggtgagatgaatgccagcatggatcctggcaaatttgcacttcaaaaggaagaacagacatcttaagcttttggtgagtttgcagtggaccagaaacgctgattctcgtgcatttcaagaaatactgctaggtaaatagcagtttctccatctcgtgagaagctgtgtggcacaggagaagcatgctactcctaccttctcttcacactgacttatcattaaggatcagttttctctacagagggtacaactgctctgtccttttggcctgataaattttaggaagataaactgagtttacatatgatactattcagtggtgtgtaaactacagcagctcttactcttggctgcatagccctaggcctgggttgcttttctacctgggaaggtttttttgtttgattttcttgagatagggtttcttttttagcttggctgtcctggaacttgctctctagaccaggcttgccttgaactcgcagggatgcacctgcctctgtctcctgagtgctgggatcaaaggcatgtaccatcaccatctagcactctgcctggaatggagggggggggagtgtcatctctctaacgaggcatgttctggccacagctccaatttttctggcaaatacaataaattagcaattgatcatgaagtggagagtcctttctcctgtgggccagggctgccaaaagttttgaattgagatccaaggcttttgacaagccccaggtaattctgatagaggttacctgagatgctgacataacagtggcctctccttaacaaaggagatcctagaatcataatcctgacttctctaactagtgactcaggaggtttatgaccttcccacaataactatagaagagccaagtctgtggctcagattttaaggaatgctgatctgaaggttgactaaacagtaaacattttggttttatttggggccaaggtttgttcctgagatagggtctcacagtctaggctggtcttgaattcactatattgccaaggcttaccttaagctcctgacttacctgcttctgcctcccaaatgcagggattaccctttgtttcaagaagttgtcttacttaccatattgcccaggctggtctcaaattaaatcttagcctcccaggtagctagaactacaggccagtgccattccttcacccatgtccttccacactaaccgtactatacctgcatactaggagcctatctctgtaggctacttactttgttctactatatttcacatagcatgaagatattgttgaatagtggcagtcaagatggaaatgttggtggcttggtgttctgaccaggttcttagatgttcttggagacatctggagtgagaggcagcctgtagtagcaacctgcataggcagctcctggcttgttcctcacaagtgctatcaacttgttgaagtattgatccttggcagcctatcagactctcagtgttgcctgaagatgtgtaaatgtaacataatgattatgtctgttctctaattctgtcctatgatgctggtagtcatggcaaggttttactgcccctatagtacacttcccaagaagcctgagttaagagggatctgtagtcttttctgatgtgctttgaagtaagtctgtgtatggagtatctgggcttcaggaaacccaggttctctaggctttgatgacattctagccttaccacatctgggcctcagttttcccatattacaatgctgggaaggagccagtaggcctgtttatattctggtcaagcgtcctggttttaggaagaaggctgtctttcttccctagctagtactgtagtcaggcttttgagatggaatccgccattctggtgtccttgtaggcaagaaggctagttgctctgtccttgatagtttcccaaaactagaacctttcaaacaagcaaacaaacaaaaaacctttctttgaccagtaggtcctgagagttttcgggtgtagaatattcacatgtcactagtgtattcctcccagaggtagcaaaggacttaggagtcagtggtggggctccacagcggtagtgttttttgattgttttgtttttaatgctgtctttgctcccagtcacctagagatgttagtaagttgtgtgtttagtgacttggtgactgtcctgatgctttcctggctgctccttgagctcttatgttatatgatagaattactgttcttagctggtactttctgctgagcctcaggattatttgccccactctgaataaatgtaacaagcagtaagaaaactccctgagctccacttcaggtacccccacagttcagtgaccttgaccacagactacagcttcccctcagcccatctggaatgtgacatgacagtgaaggaaataggcacagggacaaaggaagcagtagcaaagccacctccctcttcatccatcctgattccctggcaggttacttggggggaaaagaaatctgttttcctatatgcctttaaaaatatttgttaagagatcaaatcctagccagatggttgtagcacacacctttaatctcagcatttgaaggcagaggcaggcagatctctgtgagtttaaggacaggttggtctacagagtgagttccagaacagccagggctacatagagaaaccctgtcggggccaaaggtggggtggggaggatcgaatattgtcagtaaaagacggtgaagatggttcctccattggttgctatagaaaatgtttggtcaagcctcatgtgtggatgtgtggtcttcagaagatagttgtgagacccgggccaggtgacatgtggccatgatcctggcatttgggagggagaagcaggaggatcaggaattaaaggtcatcctcagaggactcacccacaggtgtgtagctccacgacccttgttctaccatgcagataacaagtgacagtggcaagcctgcccctcaagatatcagcagccactaactgatgcctgtgtcttgcagaactgctggaactgtggccgaaaagccagcgagacgtgcagtggctgcaatattgctcgctactgtggttccttctgccagcacaaggactgggaacggcaccaccgcctctgtggccagagtctgcatggccacagtccccacagccagagccggccactgctccctggagggcggggctcagccaggtctgctgactgcagtgtgcccagcccagccctggacaagacctcagccaccacctcacgttcctcaacacctgcctctgtgacagccatcgatgccaatggactctgagccacagactccaccagccctgatgaccactccacatggcagaatgcttgcaccagggagctggcaattgaaacaagtagctgttgagtcatcagcaagaaatgaattggcaggaagcatccaagaagcattccacagcttctctaggatttgccacatgtccttgggagaactggtgtgtcattctctgcacacggaaagtagcttgagcctcctccatgatgttcctgatgtttctcttccagctaaaactggcataacctgcctcttctcagcgtagaccaccaggctccctccaactccttgcatcagcagattgtcagtagtgtccaccaggcacctgtgccccataccatccatagtagaggcatgaaggctggaagcaggctaagggagacctttcctccctctgcctccaaacagtttcttgagctgcatcttcaccctcagatggcactgatcagtttaacagactctagtagccaaaaagcagtactcaggactccttcctgagccactcaaacatgccagaaagaagccaccacttcagtaaagtctctagtaatggtaaaaattaaagcagtctttcccaagcatcatagatcattttggacaagattttccaacctggccagctccattagcttggaacccacctcccagctccagtgtttcacttgattttgcttgtgcaaaaataatctccatcgcatggattggtctgagagaggatgaaaccattgtgttagtcttttctctgagcatgctggccaaactgaaatattgagtgcatcacctcttggaaatgcaaaaccctttgctgttgcttgactgtttaaacagtcgtcttgttctttgtgtccttctgtctctcactgtgcatgtctggatcactgggggtgtctctggcccataggttctgtttggcacctgtcaagctacagtttgaacagtgctcctgatgctggtagattattcatacctggttttatggcattacaccacttcatgggttttatcaggtgaacattctcagcctcctttttctatgttatgtgtttaatagcatccctcacagctcagaaaggatttgtgaagtgtgggaaccgttttgaaaagcctgaccagtttttcttcccatcttcaggggtttttccaattacctgattctccaaatagagtatcatctgtacctatttaacaggctaagtactgcctctgacaccttttctactgctgtttgaggtttgttaggagtcccaggacctttcccctcccactcagtatcctcctgccctgagcagtcaattagaatgagtcatcaactttgatctgttggcttttggaaactgtggtcaccttctgtacaatgaccacatctgaatattattagcccttgccccataaaagcatggatgtcattgtccttgcatatagttacagctgattttaagatttttgaaaccctacttttttgaacaagaattttcagcttcagaaacttagacttttaaaataatttttcagcatacaatacccaagacctactagttgtcagacaatctggtacagcctggcatccctggccacatccccttcagcctgctgttgagtatcctagccactagggacaactttgctttactaggtagagtcagtaccagacacaaggctgtgtcatgagaagatcacaggcttctgggaatctgagaatgtctcccggtgtaacctgggttcgttatttcattagtaaattggatgaacatctgagtgttaaaatcttggagccacaggactactccaggtggttagaatatagagctagaactagaacactacttcttaccaggttggagatcagttcctacagcaaaggtttgggttaagggcctggcctacttttgtgggctacatggttgccctgacagattctgagtttctgtttttgtttgttttttgttttctgagacagggtttctctgtgtggctttggagcctatcctggcacttgctctatagaccagtctggcctcaaactcacagagatcctcctgcctctgcctctcaagtgctgggattaaaggcgtgtgtcaccaacgcccggcctagattctgagtttctatagtcctgtttgggaactgtttggcttctgtcccttcacagatttgtctatagacctggacagggctgcagactagagagttcagttttcagactgtcactgtcttgacgctggtcagcatcgctcttaagtggcatctgctgaggactgacttttcacactccgggagctcccttccgcacttctccaacctccccccagtcaggagaagcagcagcatctagggtagcagctggagtgagtcccggcttcccacttgatttctagtctgccaatacatacgatccaatacttgactggaagtgaacataaagcttccactcatccactctaagaaaagaagaaacagctgagtcaggctgctcagaggtctggactcccagcagtaactatttggggaacaaaaagatgagggctttatcatcccctaccaggtgaaagataaaattgcagaagccagacaacaccaaaagtagtgcaactggagttatgcaaccatccctcactccagcaaacggtgaagacttggtaggtaggacgctgtggaagttaaaggagatgtggcttatttggtagtgtggctagcatgcagaagccctggattggattcccagtatgacataaaccagcttatctatcatctcagcacttgggagatggaaagcaggaggacgagaagtttaaggtcatccttaaatacatagcaattctgaggccaacctgagttacataaaacctatctcaacaaaaagaatcacattgaagaagggtcccttgtagctccatcagattggctcatgccagcaggtggcggtgagggcataaactgagtggctttttcctgagtcactaaatcacgtgtggaaacatctgcctgcccgctcaggtctgctcagggcattggcagttaccttcagcagtgtggattcttttacccatttggtccccaggaggtgcttcacttcttgatgtcaactctagcatctttagcttccagaggggatatctacattttagtttgtatagccctgtcccaaaagatggaagtgacccatacctgcttatagagggtgaagacatttttctgagtggctctggaagctatctcagcaagtatgtgaggactcaacagaactgcaagtgtgtattagtggagcataaggaatgagcagatggccatcgtcctggaaactgcagacgggattgtgggttgaaaaaaccattacaaataggacacatcttggaggctttcttcagaactggactagaaccaaggtttccaggctcctggctcagaagaccaagccagcgtgctttgatgaatgttagctgtttgcagagaactgggtggtggcatgtttgaaccaaatgtgagaaaagccagaagaaactgagctggctagtgtgggccaggtggccagctgtggaagatccttgacctggcagctgcttagcagagcctgcccactcaagtatattccttgtaaagccaaaatgctgaactacctgcttctgcctcatgtgttgacacccctttccaaagatgatggagtaagtgtgagccaggaagaagttgagatggtgggcaatgatttgaccctcaatctctccttccacagcccaagaggtaggtggtgcttcccactcagaccccatcttgtcaggcctccagctgcccagtgtacactgtcaatgcttataccaaatagggcatgtgcagctggtgtctgtcagggacagcccagtccctgccttgtagttgccagggagaagctgcaacaattgttccagtgaatggttgaaagggctgtttgatacaaggccttcattccactcctgtggctttccaagttcctgatgaggctgcaaaggctccatccctacagaaaaccaataatgtaaatagaaagccaagcttccaagcatggtttgcagaggttggtgatgaatgtgaagccacccacaggatacatttgaatctggtttttctgtgctttgtcatttgactcaataggaacttttgttacttaactctgtgcataacttatttaatgtactgtataaatgaaccaaaactgttaaatacgtatttagtttgttctacttaaagtagttaataaagatgatatattccttttctgactcaagctggactaggtctgggcaagatagtatagtggtggcaatgtgtgtgccaggtggcctgtggcgggctttagtgtcatcgtgcaccacacatggtgcatcctcctccatccccaggactttggtgaaggggcagcggagctgtggccaaaagagcatgagattggccaaatcaggaaggaggtgggctgctgaggagaaagattctagcacagaagtctctaagagcttgcaattagacccttccatgaagccagttgcagccatcttctctatcccaggaaggtctaagtgaccatgctggttgcagtagattgccaccaatagtgtacagacatccttggttcttctccattgagtaattttactaagaacattcagccacggaatgtccttaggctaatcttttcctagcaacatttgttattttcttacaaagtttcaacattaacatactagagtgtgtgaaaattttgtcttttctgtgctagcattaattcttaatttcactgatgctgtcatttgaggctgtactttacctcaaagtctcattcagcttcactgtttggtgtctggtgccctctggaggacaaaatggtgcctgctacttctgcttccatctgagctaattcctacctagggtgctcctctgactgcttttgtctttttctggtctttggccttttctgagtctgtctctctttccccccccccccccaccccatcttccaagatagggtctctctgtaacagccccagctctcatggaaattgctttgcagaccaggctagcctcgaaactcagagatataactggcatttctgagactctctctatcctatgagttcagatgatgatgttttgggtacatcagaagtttcaggagaattcaggattcagcatttttcttgtgctagactctaccttgctttgacatcccttagacctcaaggcttagtaggccttggcacactgtggaactgagtaaaacctgtcatcactgtccctgcttcttagctaggatactgctgtcaagggatgcccattttcagtgcttcccacacttgacagcaagtagcagttggtaccagggcaaagcatgcaactgcctgtgtgtctctcctgtaacttggggtgctagcattgcctactcactgggttgtgagggtgaaatgtgatcgcaagagagccaagaagagcatgtggatattgtttcttaaatcaatgataagcaagctgcaattcatagagccacggcagttaggtttacagcaagggatgggatggggggcagatagatcttattgggaaagggaggttagaatagttatggatggattggtggggggtgtggaacagaaggatcaaggggagaaggatgagggagggaatactaggagagaggcagctaaaattaagagccatttgaggggtagtatgaacctaaatatagtaggagcttccaagtacatatatgaaagtgatctaaatgaaatatcactaaataatggagacagaacctgaactggctatctcatcaccaaatgaaacttatggtactggaattgagttgcatctaattgagctgttggccaaaggagtcccatgggaatccccaaacaactcaggctgttgcggagactacagcacctatgccaatcattggacagggagaagttgagctgatggctacgtaagagccttcacccctactggcagtgctagcatctttggtacaggaaccttcctgtactcggcatgctaacaaacgaaacaaacaactcagctaacaaccctttgatctacagtggtgtgttaaggaaccacctaatacctgacttgacttaaggtccactccacaagatgaaacccatacccagcactgcttgggtgaccaagaatctgagattagctaacacagggacctggggtaaaaccaaataaagtcacaacaaaatgattcctaatgaccctctctacctcagacactttgtaacactcagccctaaacaggatgtgtcccctcagggctcagggaatcccatgaagaggaggccaaaagagtgcaaaggccagagaggatggaggacaccaagaaatcaaggctttctatgtcaacatgatcaaagctcatatgaactcagagattgaagcagtatgcacgggtctgcaccaggtcctctgcggatctattgcagcttccagtttagagtttttgtgattcctgagtatgtgaatgagcaggtctcttgattttcttgggctctttttcttatgtttgttttgtccaactcaaatgtattagttttgttttaccttattatcccttagaaccttgaacccttgtttgtttgtttggtttttgagacagggtttctctgtgtaacagtcctgactgtcctggaactcactctgtagaccaggttgacctctgcctctgtctttcaagtgttgggattaaagacatgtgccaccactccctggctccctttttgttttcttacaagaagcagaaagggagtggatcaggtgggagggaggtgggcaggaactgggaggagcagaggaggggaaacggtatgttaggggggtctactttcaataaagtggggggcacaggggttggaagggagccaaacagttatggtggcacatggctggaatcccagcacttagaaatgaccacaggaaaattgaaagttcgagtttatagtgagtttgaagccaacctgagctacatgagatcctgcctcaaaccagggactggagagatgctcttccaaaggacctgggttcaattccacagctcacaactgtctttaactacagtcctagggatccagtgccctcttctgaactctacagacaccaggcatgtggtgcacagacatacatccagaccaaaaaaaaaacaaaaaaaaaaaacaaagaacttctaacattttttaaggggtggagatggctcattggttgagagtactactcttgcaagggacccaagttcagttcccagcactcaactcacaacaaactccctgagaaccgaagattctgacttccaagggcacctacacacacacacacacacacacacacacacacacacacacacacacacacacacacacaatttttttgttgttgttgttttgtgtttttaatctttggggctagagagctggttaagagcacttactgtaccagaggacctgagtggagttccctgcacccaggtcaggaggctcaaaatctttatgggcttttaagccggccatggtggttatgaggcagaggcaggattgccacaagtttgagttcagtgtgctctacatagtagatcccaggtcagtccatctccatagtgagagtccatctctacccctgtcactaccaagaaaagtgtaatggcggtgttcaccctagctttggccagacagctcctgttagcatggctgtcacactttctcccagccagtctgatccctcggtggctcacctatccttgtcctctacatggaagctgtaggatttattcaagtaatatctacttcaagaatgactttcctggttcctgggaagcaaaagcaagtggatttctgtgagtttctggctagccagggctacccctgctaagaatgacttcttgacaaccctactttacagtcccctcattatatcttctcaaaggctgcatcaacaggagctaaggtgctgtgagcaatgggcactgtccggattgctgcatctggcctgatcctaagccaagccccagtcacagatgtaggcagttgaggatggtggagttgctcctaggtaaggagccagaacactggcttcaggattcactcagcccaccacggcctggttgctaacatttcattatccctagtgcctatcacagagtatgtctccagtaacagttgggaggtgatgctgagtccgtggctttggcttgctgctgaaaggctgaggcagtgtttgtctagagtaggcatcagtgcgaggccagggaggggtgactaaggcaagggatggcccctcagcctgcatgtgatttagggaaaggggagtgcatgaattgggagtgggaaagatctcaaatgtcagaaaagaaatgtcatcaacagcgaagaaaataggagccattgaagggtcttggctaaaagggatgcggtgaccataagaatgagcattttgagggccccattccagtacagagtgcagcctgatgaagctgctgtgtcactgtctgagctgtgtgttgtgaagatacaagacagagaagaggtgggctgtgggagtacacatcattaaaggcctcactaccccagcctcagattcctattgctaagactccagattcatagcgacaccttttggaccttgttactccaagacagcagtgcagctgcctgggtcctggcctcctccagtactctctgttcactctctcccttttgcggcttttctgccccaccacttccccatccactaagatcccctgcttatacttgaaagactcaaaccaagtccctgtctcctagaggactcccagcaggatagatactccctccacctgcagtgtcctctctagcagttctgagccttcagcaagggagcaaggatactctaaaatagagttagttgcacctggtagcaaaggcctctaataccagcatctcaggaggttgaggcaggggaatcaaaagttcaaggcctgcattgaaaacttactgagatcctgtcacctaactgaaagttaaaaccgaagtcggacatggcagtgcacagtgaggcagaaggatcacccaagtgtcacactgtctgcagactaaggtaaaacatgaagaggctgaggctgtagctctgtagaacagcgcttgtgtaacatgtgaggtcctggattcaatcaccagtgcttctgaagaatacaaataatgaccccaacacttgaaaggcagaggcaggcagatctcttgagttcaagctacatagtgaagaccctttctaaaaacaaaagcctcaaggccaggtctaagtgtaggcctatgtcccagcacttaggaagctgaggcaggaagagcttagcaaattcaaggcttatctgaagaccttgtgtctctcagaagtgaactcagagtgtgaatagtcagattctgaatgttccccttctgaggagactgccctggaactcgctctgtagaccagactggcctcgaactcagagatccacctgcctctgcctcctgagtgttggtattaaagatgtgtgccaccactgcctggcggtttgaagcatcttaagataatggggccaggtgtggtggcaagaaaagcacaacttccaagctagcctgggctacttacaaagtaaaatcttgtctcaaaaacaaagcaaggggctggtgagatagctgtcagtaaagtttttaagaagacctgaggtcagtccccagactcttatttttaaaaagccaggtgaggttgagccctcattactggggaagtagagacagatggatccctggggcttattggccaaccagcaaaacctcagcatgatttggttcattgagacattgtctttaaaaaaaaaaaaaagtaccaccacctgaggaaccacacgtgaggttgtcctctggccagtatacatacatactacacagatacacagacagtgatgtgttttttttccatttgttcttctgtggagcccaaggcttgtccactacaagaatgtctactgcaactcatgcctgtagttttgagagcctgttattactgttggtggggatgctgccacacaggactgaccgcagggatcattcctcccagactggttccttctctaaggagacactgaaaccacagtgtgggcaacaaacttctccaaggagccccagggcccatagggaacagatactggcagcacattctggagcctgctgggttcagatgctggccccaaagcattcaggcctcttggttgaggccccaaaggagaaccacagaaaagaccctgcctgcaggccatctctgtactcctgccagcagagatgtttttctggctataccccagcacccagcaaggatctggcagtcaggcacacggggacatgaatgaagcagctctcagaccctggccaccagccttggcttcagatctactgcagcctccagaatgaagctcttttaagggccctgcctccccagctgcaccctctgccttcttccttccccctggtctcagtatccctcttgtttggcttcccttggttgactggagttgggtatccctgccgctcagagcttgggatccccacatgtgagacaggtgacatccattccatgctcatgtgataccatatgcctcctgtagagcatcacttgaggagtccacattagttacttctcagtcttgttctgtaggagtcctccgccctgcaatggctgctaggaaggactcctgggtatgctatttggagacagtgatgaggacaggcttgcttggcaggtcctggcatgagataggtccactcaggaatccagccaagcaggctgtttggaacacctggaaggctctgtagggtgaagctgagcttggaccatatcctttctcctttcccttccatgcagggctctggaagcaagatctggggtatagccttgagctgagaatgatgatgaagctccctcattctgtgaggcagcttcagcgagggaccaactgcaacttccttccctgagtttcgcatcaatgtggccaggaaagcctggccttgccaagagagagaagagagacagacagacagacagacagacagatagacagaggcaacaccacagatgaccaccaactttattgcctctgcccaaattattgctactctgcaaggtcttcttacgactctcatagtgccctgagatgccgatgggtggggtgaggtcatgcaaatgatatgcaggtaacatgcaaaccaacccaggatcccccagagggctctggcacagccactgatgctagaaattctagggctgacccagaagggtgatagacacccaggtttctactctacaccacagactatgagttggcctagcctcaggggtcaaggttccagggtttgagaggggtccctgagcatcagccctggttctgccactggttgaggaagaacagaaacctaaccccagaacagcaaggaaaagcaggacacccctaggcagccagagagggaggggatctgcctgggacacagagcaaggcagagaataaagggaccagaatctggacttcctgagtcagtcagaagcccaggtgcttggaagctacaaacattaaaataaacaagcaagcagccccgtccctgatccctgtgctgacaccctctaccagctgaccaggctaaggcctgggaacaggcaggttccttggtcttagtgtagagttggccaatgcaggaggctctagaatgataggcggggctggagagtcaccagcttaagcagacccgactcagttattattcacaatccaccaggaggctgtgggtgagagattggggggtcaggagctggggggggctgcccctcatgggccccagggctgtttggagcacagggatacagcgcacctgggaagaacacagtggtgagggtgtccgggacctgcaggtgatcaatgagggtacgctggaaggccttgctgcagggcgactgctggtgcctgagagagccacagaatagacagaggctgcagccatctgctctaagatcagtgctctgggttacccaagattagtcctgctgcctggactcaggcaccaatccttcctctactacttttagcctcagtcttcctcctcaataaaatgggaacaaggcacctacatcactagactgctgcaaggagtaaatgaaggcacctagcacagggtcatccacttgacgatagtatatattcattgagtgcctcctgtgcacctggcattgtattgagttttttgagtttgtgttagacagggccttgctatatagtccacactggccttaaatcattgatcctcctgcctctgccttacaacttctggggttttaggtttgtgccaccatggccaacttgtgttattctatatgtctgtttgtctgtttgtttgtttgtttttgagacagggctgtgctgaatttgctgtgtagcccaatctggccttgaacttttgagctctcttgcctctacctttcagtgttgatataacaggcatgcactggatacctaatttgcattcattctttacaaatcatctcatctgggacccagatatgttaggtcagttatctgaagtcacacagccagtggacaggagagtaggacttgaacctggtccagacacttccagaacccatactcagtgtcagacattaaaccaccactcaccttctccaggaggcttcatcctgccaaaactcatagagggtgaaggtagcatggtctagcatcttctcagcagacacactgaagagccaaagaggtagccaggttgtgaccaccactgcctacctgccagtggtcttgtgggagctctgcccggagtacccagcccaccatccctccctgctcacccctccccacctcagccatctcactagctagccagggactcactgcagacaatggctctgggcccctgtcaagttcatgtagcagcacagggcacggtgaaaatccggcagggcgtcctttgccacctgtacttgcctttgtgccacaaggatgtgctggcaagagagcagctcgtcactggggtaggctaggcccagagtataacttcacccttcctaatatggttcagatcgccccctgtggggggaggtccccacagcccacaaggcctcccagcatctctgactccatcctccaagccattgaccatttaccctctctgcttaccacctcccactctgccctctagcttccatccctacttcagacctgactgtcagagagacagatcggagaacagaaaacccaagagggtcacagagcaagaagcagaacccagcacctgcctaccaggtctgagtagacagccattacccttcttcgtgagtactccgtcccgagctcaccgagtcaggacccttggcacagtcctcttcatgcaggggttccagccggggtgcctgcaagggacaagaatataggccgagcctctaacatgtattggtttgagcaagtgccacagaaatcccctctcaggggcactggccgcccagctgcttaccttgcattcaagctggtctatgagctcctggaggcggttgacctgcagccgccactgcagctcagcctctgaattccaccctgacaggggaccaggaggacatcagccaggggcccctgaacctgggagtcctctcagggtaaactgggaacagtggcagagcaaagccttgagagaataggagattcaacgtgttccccggaccctatgcagcctgctacaagcacacctgtatcgaaggatccaggagagcaggttggtgaccagcttatgctcctcagggctctgcgtcctgcccgcctgctgccacggaacctcctctgcacctccatattttcttcatccaacctagaaagtagaagttcataggctcaaggactaggattccagcacaagaccaagcttaggtggggcaagacaggtttcctgggtctctgaagcccagccctcaaaccacccatcccttctcaacagctcacggcctccctgtccaagaatgtagcctccagaaggctgagtggatcgtgacactgaggagtttggaatgcaagaataaaaggcactcagaccccggaccaaaggtcaacatcgctcacgtaccgctgaccacgggcctgggcctccagggtgtctgatgccccctccaaggagctctgcagggcttgtagctgattcacagtctctcgaagcaggaaccgtgtgacaaactggtccaccttggaggcctgttcatactcctgtgggcagggcagagaggtgtggctgaaggaggagcttaccttgctgtctgcctgtgccttgcttgagagagcaacagggaatgtgaaaggtgtagagcatgcaggccctgcacaggctggtcactcacactctagttttgttttgagacagagtgttaccttgtattcaggctggccttgaattcatgatcctcctgcctatgcttccccagtgcctgccttccgagggcccccttcctggtccaggctgggtgtttttgttttgttttgtttttccccatcctagcagatttgaagctgagttataagggtcacaacccactggtacactggttttcctgggtctcaatttctcttctttgttaaggctcatcctcatctttgccacagccagtgaggctcctgggcacagccaggcagggtaaaggtgcggaactgtatggccaattttacacttggtgcaaaatgatgtgtggtatggcctcttaccgacctgttggacccaaacttaaatctacatatgcatttgtttgttctttcattattccattcaccaatctgtgtaaccaacatttactgcatggactttgtgagacattacatatacaagacatccaggttactaaagaggcacaaacatactccagcctacactaccagcctccccttgattcctttaaggtaagcagggacagggagaattttgtttcatctgtggggggatgcatttttattttttgagacagggtttctctgtagtttagagcttgtctgtagaccagactgacctcgaactcacagagactcacctgcctctgcctcctgagtactgggattaaaggcgtgtgccaccaccacccagagcagagacaggttgactgactaagcttcaggccctgtgctgacatcttgggatactctcactcctccagctgcttttgccttgtgcctccgttttcccaccgtaccgagttgaggttcccctcggttacttgctacatagggctaagcctagtgcctgcagtcagagttctcagtctagaaatgcaaccactgttgtggaacataccattagtaatctgcccagctacacacctggacagtcaggatgcccttagaagcccgcacccccaccacacacccagacctaagatgctggaagtcctggggagccatgaagaccaggctccacagcaacttctatcataggctcttgtctgtcacctgccttggctcaaccaagatggtaccttctgaaccaggcttgtaacaaatgggacagaatagtgcctgattcctgtcgtgaagtttgtgggttctgtttccatgacatctcttcagttacttccctttggaggtataaggtaactgatcagttttctgctgtttgcaagcaaaaaccctggttggcagaaccacccaccccgtaccagcctcatcccaagaatttcatttaaccattataatttgtaagaactatagttgattccacttcatatctggggccgagagcttaaccaaggttaagcacctaatcggtggcagggcaggattcaaattaaagccacagaaattcccctctacttacctttaagcaccttataggtgctttgttaaagcactagccctgtttcacagttgggaattagagaccagaagaggtcatagacggtgaatagaggccagattctcaggggaggagcacagctttggtgtggtgaggtcacttgtgagctcacaatgcagttcacttagtggggcggggccaaacggcacccctgggtagagggcagggccgaggcagcatgggcagtggcctctagtgaccagtcctaccatgggaaacagcagttcccacaagagaatcaaagcacccagtcaggccagcaaggacgggccgcctgacatggacaaggcccgtcacaagcagttcttcagccacctcaagcggaagaagccaagtgtgagtatggggatgcccgggggaggctggatgctggggtctccacctttagagccagaggcatgagaggggttagagaatctctttagaggaggagggtccctgaagcccacacaggtggtataagggacccagaagcaagggctctttttaaccagggggcaggctgggggccacagacatggaatatcctttaccccctctctccagcccacagcctcacaacacatcactttccccttctttcaatggcgagaggcccctgattccgcccgggtgggtgagaatccccgcatcaaggctgggaaagtacgcagtggatcggcctagggtggacgatgggttcctgtgaggaggcagggtcccgcccggggtgtgggttgagcggccctgatggcaccgtggggtttgggaggttgggtcctccagatgcgcgggagtggcttcatgccctgctcgggcgcgttctttccctcacaacgcgcccacccccagaccaagatcgtactgcttttcccgctggacaagcggcagcagctggccgaggcagcnnnnnnnnnnnnnnnnnnnnnnnnnnnnnnnnnnnnnnnnnnnnnnnnnnnnnnnnnnnnnnnnnnnnnnnnnnnnnnnnnnnnnnnnnnnnnnnnnnnnnnnnnnnnccgctgtatgcgcatctgctgacccatcgtgaggcctgcggtgaaagcgacccccgcgaggagcagccacgcaagcggcgccgctgccctcgtccgcggccctgagtgcctggtgcggtccccagcgctagggctctgctcaataaagagcacatagcaacctggtcgtctgccacctttgtcccggccatcggatccaggttcaaagctgaggcccccgggtgagtaggaatgaagggtactccacaacctggagctagggctgcttttatcttatctttgtggcacaaaggccagctcatgccagaaccacagatttaaggtggtgggcttgagcaatctatacttggcttgaggtctccagagtcctcaacgttcaaaaatccctcttaggcggagggagggtcccaggctgctaacagataccataccaggaagaagagtcagccatggtggtgcggaacctaagattctgcctgtggtaacacactcaagaagaggggcttgagcctctggtctctaactcgtgcccggcagtgctcagtaactcccaaatattcaactccccaaatgttaaggtcccttagtcaaagcactttcctcctgaggtacctacccagttccatcctctaccccacatgtagccagaagcttcttccaaaaccctaatctgtctagagcagttcattccccctgatcatagcccccactgcttctccactaccccccaagcccaaggctaaaattgggatgtgcagtcccagctccccagcctgtcttccctcagtacctctcagtgcttgctccctgctcttccacactgacatggcaccagtggccttcaatgtcagtcttactccttgcatcactcctgagagaagcaacatgctctgggcagaagcccactgctggctttcttggatcccacacacggcttccagacctaaagctaccgtctccagttgtagccggctgagataataccaccactcaaaaggatggggtaggaggatcttgagttcagtgcaacagattgcttcagaaaacaaaatattctgcctttcctactgcacactgatgaccaactcaaaatgcttcccctggggccagtggtagcaggatgaaggtctcagctcactagagccataagccatggacttaaggatacattttgtcactgtccacaggcttgaatcatgctggaaaatgtgtgacccatgcacagcataggtatttacttgagagctaattgctgtcacgtggttctctcagtaagtgcacacttggcctacactggctctatcatccccttccccgggaccataattgggaactttaagagaccttcccagttaaccacagccctgtggtcgaattctgttcctaagtcctatttcgtccttgtgatccagaaaatatccagtatccgtgtaatccttattttagtctaaatgcatctgagtcttctatttgcaaccaatgtggtcctaaagagaatagtctgtccgggaggtgaggctcattgctatcttttggaggaagaaacaccagaaagatagatttggacttgcttaggttgatacctaagcttcagaactgcaggggtcaggccagaccccctgtgtggctgtcggctaagcacaagaagtcctcattgtagctgtagatgtgtggttgaaacgtctatctttagaactgatttagaagggatagcgcatatgtctggagtacacagatactccaagaatttgggagaaagaattagctggctgtgctggtctaccaggcctctattatgggctcccaaatggctgtcatcagcctggtgcgggaggaggggggtggagcactgcaagactgaggtcataatgagcccaatctaagttcctttcttttcgaaccatttcttccacctccacagccaggtaactctctagccaagctaggtgacgtgccaagagacttcctaggagtcccggactctggaaccctaaggaggaattaagtactgactaacagggccacatcccctctttggggtggagccacaaaaaagaaccgctccccctaataggcggggcctcgtagtcagaggcggggctgagaactgagagctggttatctgcccagaaggcccacagggcttcggggcacactgagcccagaaggtggcgtcggtgcacaggacccggcatgtccgcaggctgccgtcattggaccacgttgcggtggtggtagaccaaggctccggcttcaccaaggctggcttcgctggggagatccagccgcgcattatgctgaagagctcgagtctgatgccaagttgggaccggcctgtgctgcccgaagcaccaggttgcgagctggcgggcggcgtggcgcgtgcgcaccccatcaagcatggtgtggtggtggactgggacgcaatggaaggactgtgggaacgcctaatggtgggaggcctgcaggtccacccagagcagtggcctgtgctagtgagcgactcaccatcagcaccaccggagggccgagagaaggcggccgagctgctgttcgaggccctgacagtgcccgcgtgccacatggccagcacggctctgctggcactctgctccactggagcattcagtgggctggctgtggaggccggcgcgggcgtgtgccacgccacacccatctacgcaggtcactcgtggcagaaggccaccttccgtctgaacgtggcaggcagcagtctgtcgcgctactttcgagacctactgatggcaacaagccctgatcttcagccgcaggctctgccccgcaagaccgttacacatctcaagaagcgctgctgctatgtgtccctagatttccagggcgatatctgtaaccctgcccgccaccggagggcctgtttttgcctgagcaatggctgctgcgtgcaccttggcagcgagcgctttcgctgccctgaacctctcttccagccaagtctcctagaccatcctgagccaggactgcccacattggccttccaggcactgcagaagatacccataaagctgcgggcacggctggccaatacggtggtgctggctggtggttccacccttttccccggctttgtggagcgcatgaacctggagctagaggcactgtgccagaggcttgggcacccggccctaaagctctgcctggtggctcaacctgggcggggcacagctgtgtggactggaggttccatgatggcctccttgcagtcctttcagtgccgctggatgactcgggccatgtacgaggagtatggtccttttctggtgcgaaaagtgttcgattgagttttatattgaagtagaatgggtgccaccaggggtactgcaggaacagaggctgcaactctgccctagcaccgagaaccagataaacagattgaagtgtttggagctggcagggttatatgtggatgggctgccctttttcctttctgggctaaccctgaccctcattttgctttcatttgaatacccaaaccaccaccagttcagagaatgtcagtccagcagggccaggctcaaagaacaacacttgaaaaaataactcttacacgagcgaactagaagccccggacgcctaggctgtgtgctcaggtgatccttgacgttctcaattttccctttcgtgtagaaagtgagatcaaagggcagtgactagctgtgcagtgcaaggccttggggcctatcaagtaccaaaatgtatgatcaggtaaagcctcagacctgctcaccccacccccagaagatccatggacatggggagagggaccttttccctctatttttggagacgggatctcaactatatgcccaggctggcttctgtctcaagctgtcctgactcttccaaatgctggggttaaaagtgtgaactacctctgggcagtgtggtggtacatgcttttaatcccagcactcgggaagcggaggcaggcggatctctgtgagttcaagaccagcctggtctacagagtgagttccaggacggccagggctacacaaagaaactgtctccaaaaagaaaaacatgtaagctaccacatagtcttggcagatggttcttaatacataaagggagggtattttgttttgttgtgttttgttttggtcactaagggtctggagctctgactgtcaacccttgtctatacatgttgtaatataggccaacagacatgcaggcagacacacacacacacacacacacacacacacacacacacacacacctgccttatcacgtgtcctgaggtcaggctctgcctcataggctccatgcacctgtggacatgcatgacctcatctcctatgtcctagcccatgcctgctaggtcctggcttgacaaccctcagcaattacatcaggccaacaaaaacctactatgttgcctgaattgttttgggtactgggaatatagcaaagaacaaaacactagatctctgcctctcctctctcagcagggtctcactctagccaggctagcctgaaactggcagcgaatcttcctgcctctatctcctgagtattgaagattacagtgtgagccaccataacccacttcattgttcattgtcacctctggcttatagatgaggaaaccggaccagggagtaaagggcagtcattaagtgggaatatccgaatctgaacccaagttccatttcaacagccagagccatagtaggcaagagtgccacagcaccaagccatcttttcaggttccctataagcccttccctgcacttaccagctttgtagtgtccatggcggtgagcaccgcacggttcagtgactccagtgcagccagcacaggccgatagacacccaggtgtttggagaaatagtctgtgggcagaacaggtgctcaggggctccagcccacaccgtctctccagcctggaattcgccagctgccccagccttcctaccccgtaagactagcccataaagcaccccttaccacacccacctgcccaggggctgggacacaagggccagcacaggcctactcaccacacagtttctctgtttctaaattgctgtgagggaaagagaaaacatccttcagactcttagaacctgggcctgaagaactgaacatagaagccggtggccccatccttttattcagcctgacatggttatctatttggtggaggaaggggcataggcacttcaaagggtcagcccaagcctttgaagccttgaatgctgacaaagtctcagctgtatactaagggggagggggaggagaggggaagggcagctgtgcatgttcctggcgtgtgtccccaagcagagaagcagggaaggagtatccacttgaatcagatgtgtatatgtgggcacgtgggaagatgtgtattcctgcacctacatccacaggcggaggcagcagagcccagctgtcctcagacatcctctgcatgggaatggaagggttgagcacgggtggtgactcaagcctggttattctggggtcccagctggaagcagtgtagcaacaaggctggagctgaagaaggtgtaggtgggtggataaagttggcattgggccctggcgtcttttcccccaaccttcctggcctccagaaagagccatgacagcaggggacacagtgggttggaacaatctagccaggcactgccacagcaagtcactgcttctattgtactcactcggtgagatgtccatcgatgttgctgaacagttcccgcagctccgctgagctgagaaccccatcagcaaagtaattctggaattcttcaaatgagagcttaccatcatctggggagagacagggcgtggagttggtatccttgagtcctggctgcgtcctgcccccagatctaggctccccaaaggcctgatagcattctcaatcactcagtgagatagcctagggttctgactttagtggtggccctgactattttggacaaaagtccccaaaagtgtatgctgaaggaaacagggcccaccttgtacaagaaatacaagcgaccagccttggacacaccagagcatggcttgggacttagaagcacagtccctggccacataaaatagcctttcctcggggtcacagaagcaggtgaagccttctaacagtttgactctaccatgcagcagactggggacatgtcaaaagaggcagagaacagaggtgcaggatggttaaagatgatgggattcagtctgggtgatgagcaaaggtggggagagcctgagcctctgccacaggatgtcttaaatcaatggtccccaccagtctgaagaggcccacaaaaggacaagtacttggggacacaaggaggctgaaacacacgaatccgcaggcccagggagaatagaagtggaggttgaatgggtgcctcaccacctagtccagggtctgcatcccagacacactaattaaaggcttagacaactggtgtacttccctgagcctctattccttgtccatgaaatgcaatgaggaattcccacctagaaagctgttgtaaggacatcacaaggtcttgtacaagcacccatcactgagctacgtgccacttaacacaagcccccacccccaggctcgggtcaaccccatttacctgcacaccatctgttctctaggcagtatcccttgcttgacctctcaaagacatcactctaggctgtacctcgaagtccctagttctcttaccctgcctcatccccccccccaatacacacactgtgggaccaaggggaagaagccacactcaccgttcttgtctgctcttcggaaaacctaagggacaaagggaaatgagtgggtgctgtgagtggagcctgagaggtagaagtccccctcccaagccagtgaggccccagctggccagccaggtcctctgcattgacttcctcctgctcagggcagtcctgcaggagtctccagcaaggaagtacaggaagatttcacagcaagtcctaacgctgactctctcctgctgcagggtggcttcacagtgggtaggtgctcctggccagctctctgtaccttcacctcccccagcctgagttcactctgctgtaacagcctttggcatggtcccagcttgaggaagcttggacagatgggccaagatccatcctgaggagctgtggaaacctcatcagaccggaacccctactcctctgtgtgttgtcctatagtgcaccccgttttccatccaccctcactgaacaggagcttcccttgtgcctgttgaagactggcaggcagtggctagccctctgtgggtgctttggttttcccagtagtagtgagggagtagcctgagtttaaccctctcagggctggggaagaggccatctcattgtaaagactggtcatctgtgcatacacgtttgtgtgaggggcaaggaggatggcaagggtcagcagattttatttgtagaggcagggatgaagcagacacagcagcttccttaagtgctgccctcctaggaactagtcttccaaagcagctgaacaaagagcatcaggttcaaggtctggacagaacccccataggccagggtcctgaatgctaaactcttccacccaagtccctcagggtcactggtctaaacaactaaagtaaccctaacccataggctgactcagagaaggcctgctactagactgggatcacgcagcagctcagtgtggcctggctggggtaatggggagggcgggtgagacagaagagctaagcttggaatgaaggcactttcatccacatcgttgtgtgcccctgattccgtctgtgacctggaacatgtctcctctgacctgaaggaccatggtcaagatgctgagtcactaggacattgaggaaggggcatgacagcctcccccactggcaagtcccgctggagtatgggcaggagagtgccaggaccagctgggcacattattgaaaggtttaaaaaaagggaggggcggggggctcagggcagtggctgaggcaggtcaggatgctctatagccacacaagggggcttcaatgccacctgctgctaatgagaggcgtcctttaccaactgtagaactctgccacccttggatcaggcctgaggcttctggggcaggacagagctccttctaggtccaagctcccatgtcccatcagcccagcaggggctgcaatggagcaagcaggtcggtgatggctgctgtgactgagtgttgacagcccctaagccccactggccaaatttggggtggaggacggtaacactattattgcagagacaaggagacacggagcggcacaacggcacagacagtataaggaacacaaaggcagggggatgagaacagcagggtcacggataatccgggagagggactgaagcagaaccaacaaatgaggagggagagatggagacacagaggaccgagacctggggagccctgcgcccacccaccggtgccctactcacatcctggaaaagcgcgtgtcccgcagcaggcgtggggtgtcgcggaggctgaggcgcgggtggcccaagcaagcacacagcgagcaacccagcgcacgccatggctcagaagaagctcgtaaggctgcgggttgcagttcccaggccgcctatgctggctgggggcggggcgcgtgcccattggtccaagcgtggccccgcccccatctggcctcggtttccctgcctggaagaggcttccaaaaggggtgggataaggaaccatcccaggggccactggcaatgacagcctgccagttctacaggaccaggtgctccacagtctggtgtggacaaagctttagatgcagaagccattaactggtcaaactcacaagctcttcacctctggtcatctgtggaggataatgggtgccccccccccagattgtcaaagggattgcagatgttcagctcaaaggactcccattgagggtttgttaacgcatgtcatgactttccagtcataacccccttctcccagatctcagcccacctctttcaggaaccttgttttctcacttgcaaggcagggttaaagggaggaacacatgctgcaagtacaggacacatacaaacacacacaaaagcatcggacacaaacacagttgactgtgtgttgcatctttactaatgctcagaaatgtccggaaggtgcacagcaagccaactctaacactcccttttctgcacttaggtaatatgcatgacttcctaccagtcactgggtcattttcttcctctcaaatggttacatcatagaaaggaaattaaatcagataggaaaagggaatgaatattccctctgaccctagcctcacattggcatagagtcccaaacccagccctaacaccatcaaaatatttattaaaaccaaagcaggagggaacagaactgttaagaaacaaagtgcaggctggagggtggagaagacaatggaggagcactccaactacaggagggacccacccctcctccttgtccaccctgtcagtgaaggtcctcactcacttctcccatctcaaatccacctgggtgcagctagggtgctggcacaaccttctacaaggggaccatttctccaacccatccgtggctgtcagtctgtttcccacctcccactttcccaataaataaactgcaggggcctcagctcctttggggttggaaaaaaaaaaaaaaaaacaaaacagctaggggaccctgcccttgctcagagtataggaagttggggtattagcccaatctcactccaacccttagcttattccccaggctggccagaggcctcgataaataaataaacgctccattaaagcttcgatcgggaaacctttaagcagtgctattgctgccctgcaaatgcagccagccaagctaccccacctggccaggctgacacacaggattctgggagcaggcagccaccctgggcctcacaaggcctctgcagcaaggacaccaaaagtgcagttagagccccacccccaccccaatgcgcacacatgaattcatgcacacatgtggacacagcaggatgtgtctgcagcacacatacagatgtgttcaccttcattccccggtacacaacacacacacacacacacacacacacacacacacacacacacacagaatacatcccaactacacagtgcgcagtatggggtgcacatttgcgcatgcgcgcgcacacacacacagaccccacacaaaatccttccccttttgctctgctcaatctggcagcagccaaaccccagacccagaagccactgcacagagaagagagtataagtcgtgcttttccaatgaggcaggaaggatggcccagggcaggaggctccaaagctgcagacagggtgggcatctccagacaccctggctccctagacttctgtcagaaatccagaggggtcaggtccccaaagtcacagtcaaagagatctctgatgccttcaccctcctcaaggccaaagtggtagtcaagggcctcttggggcggggaaaggctgatgaactccccagggaggagccccgagaagtcttctcgaacatgctccaggagtgagtcggcagccaccagcggtgacagatggtcttcttccatgggggccctcaggtggcccatccgtgacaatactggttctggggaaagcatgcattacaggttagagaaggcccagcaggaatggggctgccatgactgcctgccccaataagcaaacaaaacctacccctacctaccttgctccaggcctagcagggactggctgggatccaaggttggggatgtggagggaggtggtggtggaggccctgcagtgccagggtcagtggtcctgtcttccccagaggatgtctcctgggatggggtcctcccagggctgatcccccctgcactctcctcaggacacaggaaaacatcgatggggccttgtttgctcttaagagagatctgaaatgtctgggtggaggcatcaggcagggtaaacttaggcccaggtgaccatcagcccagcccaccctgtcttggtcaggcctggggtctcgagtctcacctccgcagagtccacagcttgtagttgggtctcaggaggggccttgatcactatgaccatctgttctgcagggtccgctatgctacgaaggtcctggcaggtcacataggccagggttgggggagtcaaggaccatttgacctttgaggagcccctgactcagcccacataacaggacccacacctacctagtcactcctgtttttactccttcatcccaaggcctggcacaaagtcagtactcagagtctcattcccaagcttcaactgccacatctgtacagtgggctatctacctatccaattccaaactaatggctacctgtaaataactccacataaaatgctcaacagatctccaggctgggagatggaaattacttttgacaattttactcttaatggtattcactaaaaagacatattctaatgaagtttcttttaactttcaagctacaatcaggcactaaatcaatgactaaggaaaggtttgtcatcactggtaatagcttttctcttggatgacagggtcacactgtgtagtccagtggcctgtgattatttgtatttagacagcctcactacatagtcttgattggccctgattatgtggcagtgtctgcctcatacctggtcctgggatttcaagcacacaccaccttactgggcttttcttctttgttttattgagagagggtctcattgagtatccttggctagtctggaaatatgtagacacggttggcctgagttcagagatcttcttgcctctgcctcccaagtgctgggattttgaaggctgtacacacaccaagccgggactttagtgcgtgtaagtattttccttgacatgtattctgcatgagtgttttcctgacatgtatgtgcatctcgtttgtacctgttaccttcagaggtcagaagagggcatcagatgcattaggactagacttacagagagctgtgagccaccaccatatggatgcaaggaattgaacttgggttctctgcaagagcaacaagtgctcttaactgctgagccaactctccagtcctaggcttcttttaaaatttactaaaacttaatacttactttgtgtgtctttgtgtacatgcatatacatgccacaggggtgtgtgcacacacacacacatgcaggtcagagaacaactaggagtcagttacccccttccaccagggactcaaacttagatggctaagattggccaaaagcacctttactcatcaagccattgggttggcactttttctcttctttttttttttttttttttttttttttttacaagaggggtttttttgtgtagccctggctgtcctggaacttgctctgtagaacaggctgtcctggaactcacagagatcctcctgcctctgcctcccgagtgctggggttaaaggtgtgtgccacatcacccagttgttttctttttttaatatgtacaattttggaaatggtattactattctcttttatagatgaaacttaggcccataaaagccaagtaacttatcgaggcagtggtggcacacatctttaatcccagcacttggaagacagaggcaggaggatctctgtgagttccaggccagcctggtctacagagtaagttccaagacagccaggactattccacagaggaactgtcttgaaaatcaaacaacaaacaaaagccaagtaacttgttcagtgtcctgtggtgagtaagtgcagagccaggccttgcttccaaagccagaatctttcagaatccagagccctagataagctctatagtctcagtgtggtaccaccatgttccctggccaattcaaggatatcgctggctgtctgagtcctcagaaagcagctgcagctgtgtggtacagatgtgcatcaggcggtccaggtgctgctcgctctcctgcagttgctgtaggtcccgggtcaagccttcaagccgcttactgatccccaccatggtgcggctgcctctgtgggaagccatgaagagttagcagtcctcagaccctccatccatcagccatggcactcaaggcagtgcaccattgttctgtgagcaagctctttcccctctctggctctgctccccagctaggctccaagttagactgacatggacttatgcctggtctgtcaacaaacacctacatgtccccaggtaaggaaacaataacacacactgccatacaatgtcaccaagacacaccgacaagtgaagagaacgtaatacggaatgaagaatggtctatcaaaaaccaagaaggcagatgtgccagagagggcagcaggatgcctggggagaggggggtacaagagagaaatcctaacaaaactaaaacatctgtaaggccaacctcagtgatgacagcacaaagctggaatggtgtttacacagtggtccaaaaatgggcaacactgggagagggaacaggaaaccttcagcaggcgtgtttatgtgtttattggatgggacaccttgtacagctatagggagctggatctgtaagatctgtatatccctccctttctaccaccccagggaagacacctctcctcagaggcaggaagccactgcaggcctggtctggctaccaccagcctacctgactggtcagtacttacaaccactggatatgattcttggacttcttggcaatgagctggatgccctcaaggacattggtgatgtcatagatgcgccgtttctgcactttgagcacctcagccgcccagttcaggtcaacaaccccatcagctgagcggctcagcagctccaagaagcgtttggtggtcagatttaacgatgtctcatatcgtgacttctcccctggagatttcacacctggggggcaggggttaggctaggcagggctcctcaaacactcagcctgcccccaacaggcctgtctccctagcagtgtagagtgtcaggatgaagtgggatgcagagggctccttccccttagtcaggccaagcagaaaggccctgtgactgctgtctgccaaccaaagcattcctctgtggctggggaactccctacctccaaggcccaaggaagtcatgtcagccagccattccagctgcctgctggggccccagagtttacaagcatgcccacccccaaatctgggcctgagatgctagagtcatcaagcacctttgcctgggtggcggcctctgccccggaacggcccactgctcccagccagatactgatggtcagtttccagatccagcctccgtttcacctgtaacagaaacacaggaagatgcccagtaaccaggagtgagaccacctcagtcatctattaggatgcctagggatacaagcagagacagatcctaagggacacagcattaggttatcctaccacacataccattcaagtgcaagactgagttcaagttttaggtccaacaggtggttttttttgttgttttttaaatacatcaccaaagaacaaatcatggcagtaatgctagagattaaaatgagggttttgtgcatactaacacacaatctacgtttagtctcctcagttcctacagcccagcttgtcctcaaacatactatgtagccagtgatgaccttgaactccttttctccctgcctctacctcccaaatactgggcttacaggcacatgccaccaggacttgttacttctagtacttctttcaaagataagcgctaacttccttccccttactagccagaagtgatggtgtccctctgagactggtcacagaggccctggagcttctcctatgaggaagcaaggagcgggagaagagctgctgcaccattctctcatgtggtcctaaagagaagccctgctggcaaagagctgagaactccaggtgaggaggaacaacacaagcttagaagcaaatccatccagcagccttagtcctgccttctgattacaactagacagttttctgtctgcaacagggtcccatcccaggcaaaagctccagctgactctccctcaagtcctggcccacagagactacataataagccaccaaggaagggtctaggtcccttgggcaagcaagtcatttctctagtttttaactcatttacccatctataaccatggtagcagctggtgcctttcgtctggcaacacaatggctccactttgcagattaaagcaacccacattcaagatcacagtcaggaagtggcagagacacagttcctacccaggtctgtgtagaatgagcaaaagcggctaattcccatgccctctagcttaggctagacatgcagagatggaaaggaccctgaaatcccacggatagtcaagacaccctaacgggaccagacttgctgtcctctcaccagccacaggcctttctcaactaaacccgctttcaacctggcccaccacctgtcacattcatttgccaagaattctacccacagctattatcaccctcccactggacagtccagctgtccctacactggtctccctccacatctctgccttagtaaagccttccaacagcattcctcatgtgaactgctgagacggacttctcccgacccctgcctctaaggctcagcctatgcccctctcctccagcaggacccttagcaatcacttagagagatgctacccttctctctgtattgactcagacccagccttctcctacatccattacaaacagctgcagaggtgtcagtcagtcttccccgcctacccctccacaccagcaacagtgtcactggatccagtgaatctctacctaagtgtcagtcaacatgtgttgactctactccacatcctcatgctgccacggacttctggaagcttgaggaagaggatcacatgtgggcagacatcgtctatgctgtctatgcagaacagggtagtaactgcttctcatacatttcctcaccaaattcttgcctgatagcagagcctatggtggtctccaccttgggacggatctgtagcgagggagaaatccaacatatgtaccccaatgggctgaaagggccctacccagagtaacacccctacgtacaaactagcagggagtgccttttccctagtactctggcccttgttgaccgaaccctaaagacacactttgaagtaagggctcagacagatgccggtttctgtcactcctgtctagtcaaccctagcaatgagatcctaaaagccataggtcaagatattcactaatgaaaacagctgaatgactcaaacacccacccataggacaagccacaaaaactgtttacttagcccctggaacagcaagcagtctcagtgaaatactcaggcaacccaggccaacgcagaatgctctcacagacacacaaggtaaccactgtgacagactaatacggtcacaggagctgttctctagttcagtttctaacagtgtgttttggaaacaggaccacttctgtgggagagccagggcagactattgcctcctctgggcaatgagaatgctacactgtctgaagacggaccagtttctcgaatagcccaggctggcctcaagcacgggagcagctgaggaaaaccttaaactcctgatcctcacacctctactttgtaactactgtcatcacacctggctcacagcaacttttggaactattaaaaataaatcctgaggattggcagagtgcttgttcagcatgcacgaaatcctgggttcaatccccaacagcatcaagtaggcagtgaccagccagggacacatataatcaaaaagtcacccctaaaacaagagcccggagctacaactgactttctgctctaaatctgttttttacagacctaatgtctggtactacatacttcctatagtaaacatgtattatgtgcataatgggaaaatttagcttctagttgttactgtcttgtaacagggtctttgtagtacgggctgtatcctcattcttgcctgcctgaattataagatatgccaataaaccaggatagactgttggtattttgatatatttttatttaattagttcactttttaagaactttgtgtctgtatgagtgtatgtgaccatgtgggcatgggcagcagacaccgtcaaatccctcgaagctggagttacaggcatctacaaccccaatgtgggtgctgggatccaaactctagctgtcataatagagcaagtttacttttaaaaagtaatttacttttaaggcaagattccactatgtaaccctggctggtcttgaacttatggtaattctcctgtctccgctttccccttacaggacacacacacacacctgacaaggtagaggtaggcaggcggggcaaagaggaatgtctgaatcgaatggagttctgtacacaggaagcattcaacaagttcttactgggtggaagccaagcctgtagcttattgcaaggactgcctcccccccaccccccaaatgccagagcaaagtcagtagagcaaaatctggatttgcattcccggcctttggctccaggatgttgtcagcctctcccacagaaaatgtttgctggcccttaagtaccatgggggcaggggaccctgaactatctctacacctagcatgcagtggggactcactcaactggagtgagtggaatgtttgatcaaacgcagactgtctgcccaggccccaagctccaacctgcaggcacaggcccctggaggacatggaagacaagccagctgacctaccaaatacaagccgactgtcactgggaggaagggccattaacaatcaggaaataacactccctggctgaatgaggaaagttccaccatttctgggcttcagcgtccccatctcttaagaagggtcaagggtcaaaaagtcaggttgccaacagggttaagtgggtgaagtgcttagcacagagcctggcacacaaaacatccttaaacaatggaagttgctattgttattattattagcatcttggtgattccggaaggaaggcagcactgggcactgggccaagggggctatgggccttcccaagatgccgcagggaccagctgccacccaaaaccccatcagcagttgaacagctagctaccctgggttctgggccctgcccctcccatttgctccaagccccctgctgagaaccccctccagtcccctccaccctcacaataaagctggtggcccacaccctgcgcccgccctcccgcttggatccaagttccaagcttccactctccactgactcagctgccttttctaggcccccagcctaaactggtcttgagctacttgacgttcagggtaagtgaagactttttccagggatctccctcccacctcttctctctccaggaacttgagggcccttccatagatctcaggggcccagcccacccagtctttcagagtctccggggtctgcccgcctgattaataaagttccatggcaaccaggggctggaagggtggcagatggaaggacaggcagaggaagggttgcagcagctggcccagcaccccgcccccgcagagaaggcctcccagtcaggaggcctatccccagaggccgggaaagctaggccagcacctggcactccaacatcgaggcactaaggaggggtctccccaagtcacccttcttcacctcccacgtgcaactgtgctcactacccaggagccctaagttctgctgcaagccagcagacatcacttaaaataccagcccccaccacctgcagctgcgtgaagcactcacttccctgtctgggcctcagttcctccctctggcagatgggcacgtgacaacacccagctcacagcagagttgagaattctggccacgatcctaagtgtgccaaaggctgggtgtgcactaagcaagcaccagctgaatacacgtgaaccattatctttaacgaatccgacactctggtgaggacgctgaggcccagagcaaggcgcagaaaacagggaaagnnnnnnnnnnnnnnnnnnnnnnnnnnnnnnnnnnnnnnnnnnnnnnnnnnnnnnnnnnnnnnnnnnnnnnnnnnnnnnnnnnnnnnnnnnnnnnnnnnnnnnnnnnnnnnnnnnnnnnnnnnnnnnnnnnnnnnnnnnnnnnnnnnnnnnnnnnnnnnnnnnnnnnnnnnnnnnnnnnnnnnnnnnnnnnnnnnnnnnnnnnnnnnnnnnnnnnnnnnnnnnnnnnnnnnnnnnnnnnnnnnnnnnnnnnnnnnnnnnnnnnnnnnnnnnnnnnnnnnnnnnnnnnnnnnnnnnnnnnnnnnnnnnnnnnnnnnnnnnnnnnnnnnnnnnnnnnnnnnnnnnnnnnnnnnnnnnnnnnnnnnnnnnnnnnnnnnnnnnnnnnnnnnnnnnnnnnnnnnnnnnnnnnnnnnnnnnnnnnnnnnnnnnnnnnnnnnnnnnnnnnnnnnnnnnnnnnnnnnnnnnnnnnnnnnnnnnnnnnnnnnnnnnnnnnnnnnnnnnnnnnnnnnnnnnnnnnnnnnnnnnnnnnnnnnnnnnnnnnnnnnnnnnnnnnnnnnnnnnnnnnnnnnnnnnnnnnnnnnnnnnnnnnnnnnnnnnnnnnnnnnnnnnnnnctcgatgggtggcggggtctggcgaggggaacaaacttcgtacttggttctgcacgttccgcagtcccccatgacacatgacccctggactcccaacctgtggcctccaccccctcagctcatattccagaaactgtctcttctgcacgctcaggctcacctccaaagctcgcttcagccacatctccggtcctgctccatttgctcacagatcatgggcccttccctatccctgtcacctagaagccacgcccaagagggggtgccagtaaataggttgggatgtctggctttgatctcaaactgattttagctgaaattccttcagtagctagcgcccagtttgcgttcattcatttgcttacttcacacgggctccttcctgccttcaatgccagcacttgaggagacagaggcaggcgggtcttcaggccagccaggcaggactacacagtgagaccccatctgagagcctgttcagtgccccatcctcagtccagaccttactcctgccagtgaaaaggaaagagggaaacaggcagcagaaacttccaatgtgaagagactcgaccattaaattaactctacgttagacctcacgtggggcggtagggccgtgcaagggcggtgaggatgcctgtggatggatgcgcgtttactactgaggccctgggctatctccgtcagcatttctcattgctcaggtcagcccatctgaccagtattgtcctctctgctaggcattgtgccaacactgggaacagagattcgaaagatttaacaagacctacaagcttcctgcactggggcggggcgaccacaagaagagagtagctgacaacattcaagtccccaagtccagtgcaagcattgcttcctcgagggagctctcaacccagggttgcttattccattgcctcatactactttttcctctgcctcaactctgaccacactgctctgggctgccctagcgggggctgtttctcacaccctttctgggtatgacagaaatgaggctgagggcagaggagaaccggaaagcaacaaggaggctgtgatttccaagctttctgaaatgccagggcacctgttaactttgggtcaccccagctggccaatttacaatcaatccctacctcccacccaatgccccccccacaacctcttgggtttttttgtttggggatttgttttgtttgggtgatttgagtttgttttttggtttggctttgttgttgttgtttagagacagggtgtcactatgcagctctggctccctggaactcacaatgtagaccaggctggcctgaactcagagacccacctgtctctgagtctcccaagtgctgggagtataggggtgcaacactatgcctggctcaccccttggtttttgtttgtttcttttcttaagagccagtatcttgctgtgtagcccaaactgaatcaaggtaatcttcctgcatcagcttcctgagttacaggtatgtgcttcctggattacaggtatgtgccaccacacccaggaccagtttagaatctttatgagctcaggaatgtgcattttgcaatagacttcttcttcttcttcttcttcttcttcttcttcttcttcttcttcttcttcttcttcttcttcttcttcttcttccaagcgacttcttaagaaatacatttgtatttccagtatttagaaggccgaggccagaagagcttaagtcccagggcagcctggtctgtatacagcaaaaataaataaataagataaaaaaaacaaacaagaaatttctggacagtggtggcccacccctttaatcccagcactggggaggcagataaaggtggatctcagtgagttcaaggccaccttggtctacaaatcgagttccaggacagccaggaccattacacagaaaaaccctgtcttgaaaaacaaaacacaaaacaaaaccccaaggaacacttgtatccatcccagataatgtgttaatcttcaaaaacaaattggtatacctttataataaacatgtggagtggagccaaaaattacagtttctacagctgaatatagctgctttcacctgtgaccccagcagataggtgcagaaagaccaggagttctagaccatccttggctacataggcagccgggactacatgcaatcctgtcttaaaacaagcatattgaagctctcagtgatggttttcagctcagtttcttgtggaaagtggacacctagatcttgccttggccacttcaagttttcctgagatgaaggcgcaagggactagacagtactctatagactgtgaggtgctttggaaaatagcaagggtgtctttccatccccctctcatgagcagtttgtgaaattactcattgcagatcctggaatgtgtcagagctgggaaggaccatgagagcacacgagcccttgctgtacagatggggaagtgaggctcatgcagggttagtgcttgtgaacccagctagtgacagaatctggcccacatcagatcctgtccccacgtctgtgctgcccaccccccaccccacagtagagaagcgaagggctagatctcattcaacataaccaagccagacactgacggagggtgagagaggttggcacattctcgttccagatggagtgcttcccttctctgggcttcctaaggggcccattaacaatgacactcgcttttgaaaagccttctgctactcaatagtcattcaacaaacacttactgaacatctgttatatatcaaggatcaagatggttgctggaggggaaaacataatattgtcccattttatgatgattaaactgtgcttacctagtaggctgaaaggctatactacccaaggttggagaggccaagaccaggggctttgctaggcctcaccctcccaaaatattcaactatacatcctacacaagcttacagtcacaagtgctcaggaggttgccacagatcacttgattctggggattcaaggacagccgggccacagagggaaaaatcttaacaccccattataaagagggggtagatcttattatggtaggcaaggagttgcacacctttaatcccaacactcaggaggcaaaggcaggtggatttctgtgaattcaaagccagcctgatctacatagtgagttctaggccagccagagtttcatagtaagaccctttcttaaacaaacaaacaaaaaacccaaaaaactcaagttcatatccaaggtgactgagggatactaattcccactagccctcatgtcctgagtagcagaaaggagtatggggtgaagaccagaattccctgaaggaaaatgaggataagataagggctgttggatctgttaataaatagtgggcagctgagaagggcccgagagatgggccctttggccaagagcctgaagatcccgataaggctgttctcaatgtcagcaggtctcctgaggcccaccagcatccaaaaactaatccaccatcactgggtagtcactgcaattagtgtctcctttcaaccttataatcccataagtgaagcttgtttatctgcaggatgcggaaaggaaaaggctcagagagggtccctcacaactcaaggtcacacagcaaactgaggtgaaaacttagcctgttcctctgcaaaaatccagggctgcccttgatatttgtcattctctattaatgtcccaggaaccaggatcaggatataatgtgtggtttccaaagggtattagggaggagtctggtttggttagtaggtacctatatctaccaccatctataccaacctcatctaaaggattccaaggaagtggtagctcctggccctgtgtcttctgcctggagacatcttgcctttggttctttctgagatgaaaaatgggccaggcagtggtggtgcactcctttaatcccagcactccagaagcagaggcaggcagatctttgagtttgaggccagcctagtctacagagtgagttccaggacatccagggctacacagagaaaccctgtctcaaaaaacaacaaacaaacaaaagagatgcaaagtggtgtagtagtaagtggccagacctctcactctatacattcagtagacagacataagcaggaatcctgggctgtgtgaccaaggttcaccttatttccctcaaaatgcactcatttacaccctggatatctactgaacacctagtgagtgcttgccattgtaggagctggggagacacaagcaaagcagatgcatggagacacctggagcctgcaagctgtgcaagactgaagaataacttccatggacctgaacaatatgcccattaagaagtttgacaagtgacagagataatttaaagctatttattccacacaaacctcccataaatatacattcttagcttgaaaaaaaacctctaaacacgagtgtcccatcattacaaggaatacataattaggagaaatgtctctatggtgacttcatgttattaagggcacagagacatccattgttgagtcctggcagaaggcagtggggaattttgcatctgcgattcctcgttcctcttgagtgatcccaggatgctacactgactggcagtttactgtccctagagatgttctgtcaccatgccagctctagttgagtaggccccctacccactggagaggtagtctcatacaatgctggccttcagagccagcagaccccagctcatccctgctggaagggctatgcgtgcccaagccctgcaatgtgggctaacagttctaagacaggtgtcagggtcgaatgaaggaacacagcaaggagagttttcaaactgaccctcaggatggtttaattttaaaaatgtaagcacctggttttctaataaaaccagcaagagagtctggggctgtaactcactggtgagcatgcttgcctagcatgcacaaaaccctgggctccatctccatctctgcataaaactccttatggtggtacacacctgtaatcccagcactagggaggcagaggcagaaggatgaaaagtgaagttatccttgggtatatagcaagctcaggggtagcctgggccacatgcaaccctgtctcagacaaaattaaacaaaaacaaaatctgtcatagttggcaatattaaccaggccatcaaggcactaatcagttcctgtgtcattgtcctgtgtcctccccactcccatcaccatactcacttcctggcttgccttgctccatgactgtgaccatacttgccctgatgttccaagtgagtctgcaactcatagtagtgccttgtgggatacagagtaaatgtcacaatactattgatacaatgttgaatgggcaccaactggttggttccagcacagcttctctcctcggtgtgtcatgaaggacaaggtacagatatggtaggatagggaaggaaggcatttctggggtcactgtgcagctctggccatcagtcagcccttatgttcagtgggataaacttctgaggagacagggaaaaccatatacagtgacttcatgtttgccctgaccacactgatgaggtaggagattctcagagccaatggctctgattcttcatctgtaaatggaggtaataagataatgataataagaataatgtttctgatagggctgttgccatagtgaatgagcagccggatgcgtcaaacagcacctaatgtgtgaagagtgctcagcgcaatgtcaactgctgttaagtatgaagataaaagccgggcataggtggcacacacctttaatcccagcactcaggaggcagaggcaggtggatctctgtgagttccaggccagcctggtctacagagcgagttccagaacagctagggctgttacacaaagaaaccctgtccagaaaaaccaaagcaaacaagtatgtgctactcttccagaggacttgagcttggttctcggcacccacttagttaggtcttctcgctgtaactccagctctagaggatccagccctctgtgaacacctacacctacacacacacacacacacacacacacacacacacacacacacacaaataaaataaaaaaattgagacagggtatcaaaatgttcatacacacaaaataaaataaataaatctaaaaaaataaacctccaaaagtaataaaagaacggagatgaggccagtgaaatggcctgctgacaagccttagaacttgagctcagttagcagaagggtccctagaacccatatgaagaaaaaaagaagagaatattaaccccacatacacaccccaccccaaaaataagtgttaaaagtattttttcaatggttgtagtggcagcactcaggagatactggcagaaagatttctaaaaatttgaggccagtttgtctacataatgggctccaggccaatgaaggctatgtagtgagtctctttctaaaaatagatgatagagatatagatatatggctacggatgaataaaatggagatgagccacttccaatggaagtgtaggagacggtgcacatctgtaatctcagttcttgaaagacagaggcaggaaaatcagtaggtcaaggacagtattagctacatgctaaattcagtgccagcatgggctgtacgggacccaaactcaaacatgaactcatgtctacacacacacacacacacacacacacttacttggtggagactgagacagtttctctaccttctcattttgaggtttccataaagaaaaagaaaaactactcttgtccacctggagaacaggagagttgttcaaagtagcccgatcctacctctcaaaccctgtgagtcagacaggtccagagacagggagggggaaatatatttggaggacaatggagtgtggcactgagatgaaccctattccactgatcctgggtcttttcttgggggcaggagagagacaaagggttttatgtagctgagtatgaccttgaattcctgattctctggtctccctgctcctaagggctaggattttaggcatggacaccatacctgggtcctgaaacattttcatattttaacatctccagcccaagctatctctccagccccatattttaacatctctgaaattctttatctcccctcttcctttctctctcccaccctccctaatctttccactcctcctctcaactcaccctcctctaatacccacaccctccccctcctgtcttttggtgctgagaataggaaaccctgtgaataccaaatgggagacagtgctctgtaactcagctatacctccagcccctcttttcctttttagggagtcaaaataatgatgtactctagatcttgaatggcttcttagaggtggttagctacagttcacatcagtgccaggtggggctgggagtgacatcagtgggagaagccatgctcgccctacacaagattctggtttccattccctgtgcagggccagcacttgccatgtcataagcccttaggccaccaccatggtcttcagcatcaatgtaagccggccacagtggagcaaccagcttttctctccttttgtagctgacacctgcactgggctccagatgtcatagacgaatgacacctgcagctacgcaggagaggggagagcagggcagggggaggaaaacacttcttataattttatattaatatattcagaggaagagccagagccctccagccccccctccccgcccacacactatttttaaataaaaaaaaaaatcctctggaagccagagttatatatatgccaaacaggccaggaaacccagcagggcttctggggctgtcaatgaaccgaaacaggggcattgtgtccaggccactggctggctgagggggcattgttagggcctggcctcgtctgggaagaggggggtgaagagggcagggggagtgtgttcccatgactccctggggagcaatgacaatcagggccagctgcgaagcctggcatgccaggggcctggtaggcggctggcctcaaaagggccatgaagggcaggagaggattgcagaggaacagggaggggcactaggtcctgggactatctcttggctggaggcaaactccaaagcagagagacatgagggttattcactacaccctcctctctctcacccttcctgagcattgtgccattctccaaggacaccccagatcctcccactcttccttcaccctggtccaggacacccttgagcgacttcttgctggcaccctgagctcctgtgttctgttcttcattggaaggtagaaaagtctttcccaaaggtaactaacatcacactgcattcccttgcttaggtccagtgctctccctaagcatgtcatgctcaccactggtatccagggtgatggttaggctcatcatacctttaagtcatacaagggtaaaatgggtgatttaccaatacgtagccaggtgaagattaaagtatttaatagggagatgccttacttactgagcaacctagccagccggctgggatcaaagtaaatagggcaagcctataaggcagggaaaagagagagcataccatgtgcattccctaacctttaaacctctcccatgacaccctgacatcaccttgaccacgccctgatgggcgtgatcgggcacacctgtagccagccattaggaggcatggttactgtgtccccctaatacaagggtttttgtttttttggtttggattttttgttgtcgttaaaaaaagggctcactatgtagtccaggcctgtaacttactatgtcttccagcctagcctcaagtgtgtggctctgcctcctgagtgttggggttacaagttcgtagcaccatgcctgggcttttttctttcttttattattttctagcttattggctgtttttgtttttctacataggttcttatgtagagtggtggttatgcacacctttgatctcagcacttgggcagaggctggcagatctctatgagttcaaggtcagcctggtctacagagctagttccaggacagctgggcctacatagagaaactctgtctcaaaaaacaaaaacaaaaaacaaccaaaaccaaaatcctaaaaaaggaaaagagataggaccttgctactggcatgctatggcctcaaatttgtgatcctcctgcctcacctcgaggtcctaggattatgtatacatttttaaagattttgttttgctttgtttatatttgtgtttttgggatggtgtctaattatgtagctttggctggactggaacttgctatgtagtccaggctgctctcaaacttgcagagatctgccttcctaaagacgtgggtcactgctccatgcctggtgatttattcttttcaattagtgtatgtgttgggggcggtatgtacgtgcaactacaggtggccagggatgtcagaagcaccagatcctctggagctagagttacaggtgcttgcgaatcacctgatgttggcactaggaattgaacttggatcccctgcaggagtaatacatgctcctaacagctgagccatctctctagtcctgagtcctgagattatagatgtgtgtgacagcaactactagattttatttaatgcaaaggaggagaagggggaagaggaagaggaaggtatattgtgttcaactataatccagctcttgggagacagaagcagggggatgtctgaattcagggacagtctggtctaacacactgagttttagatcaatcaggtttacatagtgagaggctcatctcgaaataccaacaacaatgataataaactaaaataataaaaggaatatgtattcataagtcacaactggttagacaagtgacaagttctataccactgagctcttgcccccgcccccaaaaaagaattttgttgttgttattgtttttgtttttgagacagggtctctctccacagccctggctgtcctgaaactcactatgcagactaagctggccttgaattcacttcccctctctccactgaatgctgggatttaagatgtgtgccatgcatgactcccagccctcaaaatattttattgttaattttgtgtatgtctgcgggaaggtgtgcctgtgagtgcagttacttatggcatcaggtgtgagtgctgggaatcgaactcaagtcctctgcaagagcagtgtaagctcttaaccactagccccccttggttttggttttggtttttgagatggccttatgtagtccagactggctatcctggttggttttttttgtcaacttgacacaaaccagagttatctagaaagaggagcctcagttgagaaaatgcctctgtgacattggtctgtgggtgtgtccacagggcatattttcttgattaatgattgacttgggaggggccagtgccatccttgggcaggcagtcctgagtgtatgagaaaataaactgggcaaactatgggaagcaagccagggggagcaagccaggggcagcataccttcatggctttcccttcagtttctacctttcattcctgcctgactacctctgtgactgggtatgacctaagtagttgttagatgaaataaacactttcctccccaagtcgcttttggtcatggtgttttatcactgaaataaaatctatgacactggcctcaaattcactgtgtagtagaggatgataatgaagtcacgattcatcttactttacctcctgaatgctgaaattacatgggcaacagaacttacagctcttccaggactggggatggagctcagatggtagactgcttgtcttgcaagtacaagggttcaaaccttagcactgcattcacaaataaaggaactcacagctctgcctacatgtcccttgcttgctgccttatctaagacactgcttgtgtttattgcatctttgaaggcatagtttttgaatattctattagatcttagtatttttttgttttattttgttttgaggggagtgttttgtttgtttgtcctggctctgtgtacttgcttgcatgggttttggaaacaactctgtgagaggggatgacaggctcctacagatgccagaggaattcatgacataaacaaaggcactccaagagaagtatctaaagagctgatgtggcctggccctggtcctgactctcagctgacacccagcccacacggagaaagaagcctggaagagtgaagagaacaaagattgtgacactcacgccaggagccacatgcagccctgcctgctttctatcttagtcacgacttccgcaggagctcttgagcagagtcctggtgcagaaaaaccaggatgcctgtgtttagaagctttcttaaaccgacactcagaagagagctctgcttccctttgtcctctgcctgggtgtgtttggcctcttctgcctctgtttaacgtcaaaactctcactccaaaatgcccttcaaggctgaagtaagacattctctccctaggaatctgaaacaagacaagggaaaggggaaaacacttttctttttataaatacgatctaatttgtcaaagaaaaggacatctgaagccacagtttgtcgtgacatggccttccttctgggaggcagaacatggtgttctagtttaggagaccagagggttcaaagcctgcttcttataaaccaaacgcacttccagagcggtaaaggaacagtgtgaaaagagaggctgttgccaggaccctttctggagcctgggcgtggagtcttgagaggaaaggatcaaacacgggcagcttcttggcatctcagtctgcacattgttgctctcacacgggcttacttaacaatctctaatctgggagtggagaagcagaagggtcccaaattaacgtcagccttccccttcacttggaagtcttgagagcctgaattttgggaactgtctctgataaggcccagggtatctggggtggttctttattgctcatcatagtatggccctgctcaaggtatcagaaaagtggagctgggtgagtgaaggtacgggctcaaagaatcacttaaaaagatattttttttttttggtttttttgagacagggtttctctgtgcagctttggagcctatcctagcactcactctggagaccaggctggcctcaaactcacagaaatctgcctgcctctgcctcacaagtgctgggattaaaggtgtgtgccaccaacgcccagcccttttcacaatttttaagagttctcttggatagctttctgtctaggctgtttcttgtgtgtgtgttggggggggttctcacagaagcagtctatgtccctctttcttaactctaactctgcagtcatcgatactactgcaaaagtagcttccttgctctttatagtcaatggaagcatggatcatggacttcccgtgatttcttgtgacaacacggaccatggatatccacatggtgtctggcatcaaaaagtgccacagacctcagcatggtcttctgtggtggtacagaccacagatactaacatggaccacagataacatcatagcccttagtggcagcacaggtcaaggatatcaacatggcttctgggacaacagggcccatagacaccaatatggtccctggtagaaaaaaacattttttatagctatgggtatatgttttatagctatgggtgtatgttttatatgtaggggtattatgtctgtgtagtaatgcctgagagggccagaagagggcgtcacatcccctggaattgaagtaaaggttgtgagctatcgtgtgagtgctgagactcaacttgggtcctctgaaagaccagccagtgttttcaaccacggagccatctctccaacccctcaatggctcactttctatagaatattttgttgttttaaagccagaggtttttttgttgtttttttttttgtttttttttttttcactgtgtagccctctggctgtgtggaactcacactgtagaccaggcttgcctttgaactcacagagatccacctgcctctgccttccaagtgctgggattaaaggcgtgcgccaccactgcctggctagaatattaatcagaaagaagccaaacacaaatatgaggatcaacgtcaaaaaagtcaagattaatgcaacataaaggtttatttgtagacagagtagtgatcatacgtaggacacatcagaagactgtgtcgttcagaaagtgctagaacccaggggtggggcaaagggttaaaggatggctcagtcggttaggagcttgcatataagcatgaggcccaaagtctggatctccagcatccatgtatacgccaggcacagtagtgtgtgtctgtaatccctgctctaaggaggagagacagggagaagcctggagctcactggccggctaacctaactgaaccactgagaaagagaggctccacctcaaaaaaaaaaaaaaaaaaaaaaaaaaaaaaaaaaaaaagtggaaggccaggcttttgtggcacacaactttaatcccagcactcaggaggcagaggcaggcggatctctgtgagtttgaggccagcctggtctatagagtgagttccaggacagtcagggatacacagagaaacatgccgtcccccgcaaataaaatggagagcaactgaagtaggcaccgaatgtagacctctatcccccacatgctgacacacacacacacacacacacacacacacacacacacacacacacacacacacacgcatgcatatgcagactggggtaggtattcttatagctcgtttccctggtactcaggacccagcttaggtataggagagagtcaaacttctgttaaacagcttgatgtttgtttgtttgtttttgttttgtttgttttctaagacagggttattgtgtatccctgcctggcctggaacttactatgtagatcaggctgttctccaaactcacaggcctgcctctgcctaccaagtactgggactaaatgagtgcaccaacctttgagttttgtactaaggagggagggggtgctttttgagacagggtctctcatgcagtgctggcttctgcctctgaaaaggaggatgacaggaacgtacaggaatacactgccatgcctaactttggctatacagtgagttgcaggtcagcctgggctatagagtgagactgtgtcaagaaaaaaacaaaaagcccaagcaggatgacacatacctgtaatcccagcattcagcaggtagaagcagaaggatcaggaattcaaggccagcctcagctgcatattgagttcaaggctagcctgggctacatgataccccgtgttaagaaaacaaaaccaagactcccaaaagggagaaagttaattaaataataagataatttttaagtccggcatgtcaaaagactccatacaaatgtggcaggcagtaattgcagatttatctaccttgctgtttcaggaagtcccattcaggaatggcagtagctcctccgtgtatgccaatggttctttagcatttcctacatatagatcataaaaatggaggcttagctagggaagagtgaagctgggctcttcccaaagctgctgaagacaggatctgctcctctctgtggggaccaccccgccttcctccctggagtgtgcagttggaggcaccagatgctctggcaagatccagagagatgccatctgcgagggaagcctattcttagagagcagaaccagtcagtggtggagccggccaccccccgcagcagaggggggatgtcagggcaggaggccaaggctagctggggagaagggcaggctaaacacagggcacacttatttcttacaaccagctccctcctgcatttgctctattggaaataagagcaatgtttgttgaatgttcacttgtatgtatcactcaaaccctccagacaccacaaggtgtgtgtcatcacaacgcctctttacagatgaggcacagatggctacgtcactaataggtcaggcctcaagcccaggcatgctggttccaaagcccttgtctcttgcaaccatgtatactgcttctcagtggccaattttagtttgggttacccagataataaaccccaaggtgaggatttgaaagcaagtgctttaagtgagaagtggtcccaggatgcaaaggctgaggcatgagggagatagtttccatgggctcctgaagcccaatccttctggagctctagcaagcagcacacagagtatatgggggttatctcctccaagggctgggaggtgctcatgatggctcttctcagtgctgggttaatgctgctcaaggggcatgtcagtccctaaaacttcatgcctgctgcagagtggtaaagcaggccccagtggtgggagtcctcagacagggaaacacaggagtggcaactggagaagtcgggtgttcacgcagagagaatggcagggctccccaccatctgctataataaacctgcctggcaatggtcggcctccccacagtctcgagtttgctcatcaagcacagtaaaaagctcttccaaatggtctgctttgagcttacagtgagctgcagccgagagcactgggaagtcagacaaaagccacctccaccaccccagagatacctaggataatgatgcttggccctgctgttcaccactcgctcagtactcaggctgggctcatagcacagcacttacagcataggaacctgtaggctataatagttccaaaactattccacacccctaagtcagaatttatattgtgtccatttgttgtttatttttgagacagggtctcacatgggccaggctggttcccaacttgctatgtagcggagtataaccttgaactcccatcctcttgcctccacctcccaggtgctgtgaatatgggtgtgtatctccatgcctggccataatctacacactaataagatttccagtgactcatgtagatttctaccagtcatttcaaacacataaaaacacaggggaggaagggcacattaaagtaatgtattgcactaaaccaagggtctcagactggcagcctctggaccaggcttttccgagagttgttttgttttaaaaattctgcctgcagccgggagttggtggcgcacacctttaatcccagcactcgggagacagaggcaggcggatctctgtgagttcaaggccagcctggtctccagagcaagtgccaggataggctccagagctacaaagagaaaccctgtctcaaaaaaccaaaaaaaaaaaaaaaaaaaaaaaaaaaaaaaaaaaaaaaaaaaaaaaaaaaaaaaaaaaaaaaaaaaaaaaaaaacccctctcaaaaaaaaaaaaaaaaaaaaaaaaaaaaaaaaaaacctgcctgccacacaaccacacaactctctagttcactgtgacacatttcctcctatggcatagcacctcaagaacatccatttaggagtttgaatttgtggctgagcttgaagcacctggaagcctagtctgccaagttgtcgcagacgcttctagagaattacccaggcattcatgtaagcaggaatcaagataactacagtgtctgtccctgaggaggatttatgtcactataagcaagtagttgttcgtatgcatcctgagaacacaaaagaaaaggcagttgtgtcccacaaagtggttcatgttgtagataaacatatactcgcttttgatccaaaacaagaagtcagttttttcaagaaaagaaaactacaaattttgatattactaaaaggcaaaataaagatcttaagtttgtatttgatgctgtttttgatgaaacatcaactcaaatggaagattttgaacatactactaaaccaattcttcatagttttctgaatggagacaattgcacagtacttgcagatggtaccactggagctgggaagacacacatgatgctaggatcagctgctgatcctggagtaacgcacctaacaatgttagaccttttcaaagccatgcatgagcctaaagaagagaaagtgtgtagtactgctgtttcttatttggaggtgtataatgaacagaatcatgacctcttgacaaatttggggccacttactgtccaggaagatgcccccaaaaggagtggttgttcaaggtctcactttacaccagcccaaatcctcagaggaaatattacagctactaggcaatggaaacaaaaacaggacacagcatcccactgacatgaatgctacatcttctcattcccatgctgttttccagatttatttgtgacaacacaaataagaatcaatcaaaatatctgtgtagccaaaatgtcactcattgacctggcaggatctgagcaagccagaacttctggtgctaaagggacatgatttgtagaaggcacaaatattaataaatcctgtttagcccttgggaatgtcatcaatgccttagcagatacaaaaagaaggaatcagcatattcctttacagaaatattaagcttgctcgcttattgaaggattctcttggaggaaactgtcaaactgtaatgacagctgctgttagaccttcctctttgttctctgatgacacatataacactcttaagtatgctaatcatgcaaaagtcattaaacctttaaagagtgatgtccttaatatgtaaagatctgtaatgtgcagaaaacagagattttaatgctgaaagaaaaactaaaagcctatgaagaacagaaagccttgactgacaaaaacaacagtgtaaaatcagtacatcaaacactcaagacaaagaaattaaaagacttcaagaaattcggaaatgcttgttccagagtcgagaagaaatcaggcaagaatatctaaagttagaaatgttgcttaaagtaaatgaactcaagtcattctatcaacaacagtgccatcaccaaatagagatgaagcattcagaagacaaagtagaaaaggccacttgcgcccagtggtggtggcacacacctttaatcccagcactcgggaggcagcagctgctggatctccgtgagttcgagatcagcttggtctacaagagctagttccaggacagcctccaaagccacagagaaactctccccccaaaagaaaaagaaaagaaaaggccacttgcaatcgagatcacagacttcaaaggttgaaaactgttcgctgtttcctagagaaaaagaaggaagaggtgttgaaacaatttgacgagaataccaattggctttcttaggtcaaaatggtgacatcccagaggtactcattaaagatcttcattgtcaccaatatacctccagaccaaagacctgaaaacacaaatggcacacatgaaggctctagcctgtctccaagagcagcagcacagtcagattgaggcagtattgaatgttttacttccagccctaagaaaaacgtatttcatgtcagaagaaactaacctgtctaacgctgcttttgattctgacttctgacttcaaagatattgagcatttggtagaaaggaagaaggtggtggcttggactgaccaaactactgaacattcaaaccaaaatgatgttccagggatttctcttcttttttttttttttttttttggtttttggagacagggtttctctttgtagctttggagcctatcctgcactcgctctgcagaccaggtcagcctcaaactcacagagatccacctgcctctgcctgccgagtgatgggattaaaggcatgcgccaccaacgcccaacgggatttctcttcttatgaccttcccacagcttggaccaatgcaatctattccttgttgcatgtcctcaaatgaacctgacttgcttaacattactccacaaaaaagaaccagaaggaaattaacaccatcttctttgaaagtaaaacatactgagaagtctccactgtctgaaagtacaagctcaatgattctttcagcaaagaacttgagcctattgcttataccccagaggactacagaagaccttttcaaaacccatccccagccttaataaaaccttcatcacatactacaaataatcaatgataattctcatggaacactgggataaaacaagttggagtgtgaggcccgtggctttgagaaggcaggatcctccgtgagggtgtgttgatagaaccacactctgagcagcagctcacactgcctggaagctgtctgggcagaggagttccttaagcaccttgggctgtgttacttggaggggcggctcttgttgaagatgaggaagtctgagatgtcatgccacacgttgctgtcctcgtagaggtaggtcatggaggactgcagtgagggctgcagagtgggccggtgatactcaaagagccatagcacaagcccccaaatcactgctgtgtgcaaggggaacgggtcccagctgagcttagggatgtagcccttctccacacccaggcggcacaaggcaaacaggacgcgtgatgtcaggtacatgttgatctgcagggagggaatgctgagggttactagtcagcatggccactgggaaccttcacctgcccacccaaccctaggcactgggcattgctgtgcagcggctctgtgattttcaaagttaacgtgcaagatgattgaggtggtatgcagcagacattttaatatttctatttatgtgtgtgtggtgcgtatgtctgtgtaggcgaatatccttgtgtgggttgggtgcttgtgtacatgtgggtatagagactagagactgcaattaggtgtctctctcagttccttctctggcctaattatttgttttgtttttgttgtatggagacagggtctccctattatgtagctttcctagaacttgctatgtagaccatgctagcctggaactcagagagatccacctgcctgtcttctgagggcagggattaaaggtgtgagctaccatgcccagctccagccaggtgtaattggtcaggagtggtggcacatgccttaagaggattgagggccaggtgactgtggtgcacacctttaattccagcacttgggcagcagagtcaggaggatctctgtgagtctaaggccagcctggtctacagagcaagttccagctgaggctatgtagagagacccagttttaacagcccctcccccaaagaaacctttcaatttacaactgttttctctttttaaagatttaaaagcactcttaatctttgagctataggtccattctgccccttacccaatttgttgagaccacagtttctcattcaacacggagtgcaccaatttggctatgctagctgactacagagttccaaggatctacctctctctacctcccaaatactgggattacagacagatgcttctgtgcttggctttaaaagaaataggtaataattattatttatgtatttactttgtgtgtgtgtgtgtgtgtgtgtgtgtgtgtgtgtacttacttaactgtttttcctcagaaaccattcatcttgttttttacttttttttttttttttttttttttttttttttttttttagacagggtttctgtgtgtagctttggagcctatcctggcactcgctctggagaccaagctggcctcaaactcacagagatctgtctgcctctgcctcccgagtgctgggattaaaggtgtgcgccaccaacgccccggcgttttatacatttttttatttttgagacaaggcctctcatagcctggcactcaccaatctggatagagtggttggttccagagagcccaggtcccctcctgcatctgcctccccagtgctgtgatttcaagtaccatagtggctggctttctatgtgtgttttggggatggatgtcaggtcttcagtttgcttcataagtactttgccaacagaacgacctctctgttccctttttagaagctgtggttttgttttgttttgttttgtttcaagacaggatatcactatgtagtcctgactgtcctggaactcactaagtagatcaagctggcccaaaactcagtgtctttgtctctgagtgctgggattaaaggtgtacaccactatgcttggctcctttattagaagtttttaaaattgtacacagttcaaaattttaaaaaatgatccataagaggaaaaataatattttggatttccttgaaactcattttttctatgtgaagccagctgggtatacagaataaattccaggccagttggggctacaaggcaaggccttatctcagagaaaggaaggctacaaggagagccattcacaatacatatgtgcaaagcatcagcatgtaaatgttctgaaaagtgtcctcagggctcacaagtaaaacatgaaacattccagctggaaaatgagcaaaagatatgaatgtttcactcgatgggtagcaaataagtgataatgaggaaaatttcaacatcattgttcatcagggaaaggtgaagtcaagtcacaatggataggacagggctggtgagatggtttaggagctgagggcacttgcagcaaaagtctaacaacctgaatttgatccacagagcccacagagtggaaggagagaaccaatttccaagagctaacctctgaatcacattcatacaccatggcaggtgcacacctgcacttataaacatcacacacccacccacccatacatcccaaaacctttaaaacatagataaaataaattgtgaagcaaaccaaatgttaataggatatggagaaactagacactcctatatttgtggtgagaatgaaaaaaaaaaaaaaaccatagtcactggaaaacagcttggcagaggtttgtcagtttctttctttcttcttttttggcaggttgttttaaaatcaagcatgcatgtaccatacaacccacaattacactcttgggcttttatcccagaaaaatgaaaacttatgttcacagaagtatctatacaagagtgttcttcacagctctatttgtaacaccctaaagctagaaactgcccaaatgtccatcagaggatgggaaaaaaaactgatggtacttctatactacttaggagtaaaagggaaaaattaagccagggtggccatacatgactataaccccagtgctcctgaggctcggggggaattgccaaggctcaaggccaacttgggctacagagcaagacacagaaaaaaaaaaaaaaaaagctggttgttggtggcatgtgcctataatccaaaccccggggaagtataggtaggaattcaagttcagactcagctatagattgagtttgagtcaacctgggcaacatgagaccctgtctcaagaaataaaagggactggaaagatggttcagaggttaagagcatttgctgctcttgcagaggaccaggcttggttcccagcacccacacagcagctcactactttctataactcatgtttcaggggatccaacaccttcttctggcttctccaggtaccaggcatacatatgctgcacacacatacatgcaggcaaatactcaggctcataaaagaaaaaaaaatgttttaaaagaaaaagtcaggctgtccttcccatgtgactctggcatttttttttccccaaagaagtggtctattttttgtcagccaagtttgcaaaaacagaattagccataatattccatagctttttatttttttttttttttttttttttggttttttgagacagggtttctccgtggctttggaggctgtcctggaactagctcttgtagaccagaccaggcttgacatgaacacccaaagatctgcctgcctctgcctcccgagtgctaggactaaaggcatgcaccaccaccacccagccaatattccatagcttttaaaatctacatttcatttactattattttattttagaggtgcagggaaaatatgtgatagcatgtgtaaagcagtcagaggaaaacctttgagacttgtttctctctttccaccatgtgggtccccggaaccacactaagtcatcacacttaatggtaggcaactttacctgctgtgccacctcacaggccctcagtgcttgtgctttttatctttatttttgtgtttgcttatttattatttattatttattgagacaggttctctctatgtagccgtggctgtcctggaactcactatgtagaccaggctggccttgaattcacagatatcctcctgcctctgcctctgcctcctgagtactggggttcctcaaggccttttaatatacacaagacattaaacataacccttgtatttccagtatgggtaaaagtctttggaggtgatgctggggtagaggcttatagattctattcatctttaaaacaaaacaaaacaacaacaacaacaaaaagaacggcttctctctttcaatttcccaatttccatttcattgagttcttcttgtctgttttgagatgcagcccaggctggcttcaaatatgtgccttagcctctcaatgtaccaccacacccaggtcaaagtgcattaaaaaaaaaatcctaaactggagagatgactcagcagttaaaagtacttgttgctctcttgcacaggaccagagttcaattcccagcacacacatagggtggaacataagttcctgtaactctagctccagaagatataacaccctcttcagccctccacggacacccacacacaggtacacatgcatgcagaggcacacccacatacataaataattgaaaaatggttgtaccaccaaattattgatgcatatgtaatctcagcacttgggatgaggcaagaatatcaagagttcaaggcaagcctccgctagctacatagcaagttcaaggcctgcccaaacaagatgaaacagtctcaactaccaccaccaccaccaccaaaatccttgccccaaagagcagcagacacactgatgtggggagtcctgggattccaactgtggcttggtttacaagtgggaaaacggagggagaagtgactttcccaaggtcacacagggactggtgattcttggacctcagacacagacagcagccaacagttcatctttactcccctgtccctcaactaaagggcatcccactgtcccatctcaggaaagtctttacctggctattgatgttattgttcttcctaaacaccaggaggcccccgatgaaggctgccaggaaagagtgcatctggtgggtctccccttgcacatgggactgtagggcacagagactcttatagatgaacacaaagcaagccaggttccgagagtgggtgtacgtggctttcaggatggcctgtagcttctcttggagactgcacaaacagaaagccccatgagtgcaggcccagagtacatatagctctgaattaggcaaggagctgtagcccatccaattcaaaacctctgtggagggtgccccatgtcctcaggggcactgcgctctcaccagactggggccttcactcagtgtcaccacctcagggatcactccctgacaccttgcattaataagtgcccatccccttcctcatttgtcttttccatcatggctctcatggccatttaacatttgtgagctgatttatcaagttcccttgtcctcagtataagttcctgcagagcagggtctagattttgcttgttcaccctaagggcacagaatggggcctgacacacagtaggtgctcaacaaatgggagaggtgagtgaacagtgaacagatgaatgtgtgcctgctatgagctggagttgcagataaaatcttgagaaatggcaggtctgctttctacatttgtggggcttatgggcgagggaataattgccaaggcaagaatcagacattgactttgattaagaggtggtcctggaatctgaaggattccaagcagaagactcatcatccaaaaggccccaaggacaggcacagaaatggagccaagcaatggagagaggtcactgcgggctctgagcagggactgtgtgtggagggcagtgaggaggtcagcacccagggctggtctttcttttgagatgaaaaggagctgattcaattcaccttttccttaaagggagagagagagagagagagagagagagagagagagagagagagagagagagaaagagaaagagagagagagagagtctatgtctgtgggtacccacagaggccaaaagagggcattggattccctggaactggagttataggcagttgtgaactgtgtgctgggaactgaactctagtcctctgtaagagcaacaagcactctcaatagttgagccatctctatagttccactaggggacaacaaagataactcagggagagagcagagtatacctctcaattctgttactggctgatggacttcgaagacagttaactttttttttttttaagatttatttattcatttatcatgtatacagcattctgtctgcatatatgcctgcaggccagaagagggcaccagatttcattacagatggttgtgagccaccatatggttgctgggaattgaactcaggacctctggaagaacagtcagtgctgttaacctctgagccatctctccagcccctcctgctatttttaatgttgattttttgctgcctcctgctagaagataaaccctaggagggcagggatccttgtctgtcttgtccactgctgtatcattagcagccacaacagtgtgtattatataatagatgttcactgaacacttggagactgaatgagtaagtttgggttttaaagaatgcttttggaccctgtctcaaaaataaaacaaaacaaaaatatttggaagggctgggcatatagctcagtgccagtgtgcttgcctactgtgttccaggctcagggccagtgtgcttgccttccaatgtttctcactctggaaagagaaagaaaggggagaagagaaggagagagaagggaaaggaaaaaaaatacaatttggagggcaaaaatccccaacatatataaacaaaataaaactgccaaaacagaaatcttttttaaaaactcaatctcagaagatggacaaaacagaaatcttgcaatttggacttggcctaccctctttgtattcttcttcttcttcttcttcttcttcttcttcttcttcttcttcttcttcttcttcttcttcgatttacttatttatattttatgcatataagtgctttgcctgaatgtttgtgcatcacctatgtgcctagtgtctgcaaaggtcagaagagagtgttggagttcttgggactggagttacaaatgattgggagctaccatgtgagtgctgggaactgaactcgggtcctctgaaaaagcagcaagtgctcttaaccaatgaagtcatctctccaatctctgtatacaactctcataaactacaggtgtgtctataaacatcagactgcaaggtgtttaaggccttgaaggaagggactcaggtcaggacacagagcaggagaggagagatcagagactgatttccagagactatgacccagaggactggacaggtttctgggaggaaaacagaagctggctagaagaggatagctccctggaagcgggtgtgcacaggccaatgagtgggagtgaagtatcacagcctgcatggaacagggcctgtgtgccacggaagcccacactggacactgtaggggttagctgtgtcacaccgcagagggttaggtctttgtggagcatagtgaggagccacaggcatttccatatggtcagagctggactttaggaagcacagggaatcgggaagccagtcctagcttggaaactactacacccatcctggcctgagggctgaccacattgtctcccaattggtatgcagagagggtaggtacctgccactcctgaagagaaaggtcatgaccaatgcatgaggtgcccggattttgactccatagctgtagaaacagagacaaacagttactaatccatcactgtagcagtttccaggaccctgcccccctttggcccctggtcctttctcccttccccagttctgataccatgatgggagaaaaataatgttggctttccagttacatctgggctcaagttcctgaggcccctggtagagtgacctttgccttagcttgaccctctctgagcttcagtttccccaaaaaggaatgcaaaaccccagagggctgggtaaatggttcttgtggacaaaaatgaagtatgcaaaaggtgtccactattcctaccttgcagaaatgctctctccactccttcctgacctgtctattatagttaggctcatctttgattaattttaaatttgatttattattactagtactgttttgttttcttttaatttttctgatgggcatggaaatcaggattcactagactctgtatagtggagtttattaggggaaaagaacgtagacagaaaacaagaggccctccagctctaggaatgcaggtcctgccaccccgctgctctccatcactgaaatgggcaagagagctccaagccccaaacctaatcctaatcactgatcgcatccatccccacctgtgaccacgcccaaaaggcgtggtcagtgctacaggcttgcactgcagttttcattacattcattcatagacaaagaatcttactgtgtagtactagctctggctggaactcactatgtacaccaggctggccttaagcatgtcctaacactcgggaggcagaggcaggtggatctctctgagtccaaggcctgtctggtctacaagtgagttccaggacagccagggctacttagtggggccctgtctctaaaaatgaatcaacaacaacaacaaactcacagagctctgcctgcctatatacccctgagtgctggaggagtgtgtcaccacaccaagaattttcattttatttaactttattgttgctattgttttggtggatttaaaaagttattgaagtaatttatttgtgtatgtgtgggggcatgtgggctagctagttttatgtcagcctgacacaagtgatagtcagctgagaggatggaactttaattgagaaaatgcctccataagagcaggtgtcaagtcaggcgttggtggcgcacgcctttaatcccagcactgggaaggtagaagcaggtggatctctgtgagttcaagaccagcctggtctacaagagctagttccaggactggctccaaagctacatgggaaaccctgtctcgaaaaacagcaaaaacaaacaaccaaacaaaaaaagaaaccagacttcaagttggttctgaaggcagtagtgaatgcctttaatcccagcgatcaggaggaagacacaggtggatttctgtgagtttgaggccagcctggtctacagaaggagctccaggacagccagggctacacagagaagccgtcttgaaaaatcaaaacaaatagaaaacagatcaggctgcaggtaggcaagcctgtggggaattctatttatttatttatttatttagacagggtttctctgtgtagctttggagcctatcctggcactctctctgtagaccaggctggcttcgaactcacagagatccgcctacctctgcctcccgagtgatgggattaaaggcatgtgccaccaaggccctgtgaattttcttaattagtgattgttttgggaggaacctagcccattgtgggtgggtggtgttacctgtgggctagtggtcttggaatccataagaaagactgagatcagctcctgcctccaggctcctgcctccaggtacctgcccagtctgagttctgccttggtttccctccatggactgtgacttgagatacgcaggctacataaacccttccctctctaagttgcttttgataatagcgtttcatcacagcattagtaacgttgactaggacagcatgcatgccacagcatgtatgtgtgttagagaacagctggtagcaatcagttttctccttcccccacttgaacttggggatcacagtctctctggtcttcttcaggcttggtggtaaatgctgttacctgctgagcttcaccaccaaccctggctttttttttttttttttttttttttttttttttggtaaggatcttgtgtaggcaagtctctatagctgactgagtgactgaggccttgaactcctgatcttcctcccaccacctcttgaatgctgagattgtaggtgcctgctaccttacctactttaatatatcattattatttcatgtgtgtgtgtgtgcctgcacacatgcatgcatatgcatacatggtacctttggaatctagaagaggtggcaaatcccctagagctggagttacaggtggctgtgacctaactgctgtgagtcttgggaaccaaactcaagtcctcttcaagagcaacaagtgttctgtctctgcctcccaaatgctgggattaaaggtgtgtgccaccaccgacctgcctttcttatttttctttatcagacatcttatgctggttagttttatgtcacaggctagagccatctgagaggagggagcctcaacttagaaaatgtctctataagttcaggctacagggaggcctatagggcattttcttcattagtgatttataggggagggccaaggtcattgtgtgtcataccacctctgggctgatggtcattgattctataagaaagcagactgagtgagccacgatgaacaagccagtaagcagccctcctccatggcttctgaatcagctcctgcctccaggttcctgcctggtttgagttattgccttggcttccctcaacaaactatgacacagaatttgtaagtcaaataaaccctttcctttccaagttgcttttggtcatgttatttcatcatagcaatagtaaccctaactaagataccttcaccttcatttctgcagctgtgtcaaggcttttgaagcctaaaatctcttgaaggccttgagacaatgtttatgagccaattttgactgtcacttgaatatataggaatattcactgcaggtttcaaaaaagaggggctcccatggcacacaccattagtctggtacttatatgaaacaacaaatggccagaatcaggcactgggtagacagctcagaaagtaaagttgcacagtaagcatgaggacccacggaagagccagtacagtggggcacattaacaaccccagaccgttgggacagagatgggcaggcagagccttgcagttcaccagtcagccagcctagccaatggatgagttctaggctcagtgagagacactgtcacaaaaaccaatacaaaaaatgacagaggctgggtgaatggtggcacacacctttaatctcccagcactcgggaggcagaggcaggccgatctctgtgagtctgaggtcagcctggtctacaagagctagttccaggacagctaggctacacagagaaatcctgtcctcaaaacaaacaaacaagcaagcaaacaaacaaacaaaaagtgatggaggaagacaattaatgtcaccctctggcctccatacgctcacccatgcacatatctgcacgaacatgtacatgagagagagacagagacagagagagacagaggatggtctcctctctctgttttcattttacaacagagaaattgaggcccaaagagagtaaaagagggcactgagctgagtgtggtggctcacacctttagtcccagcacttggaagcataggcaggcagatctgtgtgagttcaaggccagcctggtctacacaaggagttccaggtcagccagggctacatagagagactctgtctcaaaaacaaaacaaaacagaaaactaatttgggactggagagatgggtcagtgtttaggagcatcatatcctctctggcttccatgggtactaagcatgtacatagcacttaaacatacatgtaggcaaagcattcacacacataaaataaatgtatcttgccaggtgtacacacatttaatcccagcactcaggaggcagaggcaaatggatctccttgttcaaggatagcctgtcttcagagcaagttccagaacagccaaagctacacagagaaatcctgtctcagaaaaacatcaataaataaataaataaataaataaatatgtcttaaaagtaattaattaaaacaactttttactcttctttcctacagtacatcctgagtgaagcctccccctctttacccctctcactgcctctcccccagatccactgctcctccactcattaaaaaaattgggggagagggggtcatgatgagggacatccttctgtgtatatgtttgtcttattgattaataaataaagtactgttggccaataggaaagcaagataggtgggactaggagttgaggaggattctgggaaatgtagtaaagtcttgtgatccaggcaggaagtgacatagcaggcagactcagaaaataagcaggaacaagcaggaagtcgccctcttcctcctgctctctgctcaggagctcccatgtgaccactaggaagacaggacccaaggccagtggcatcatctataagtcttataaatatatagattaatatagataaaaatatcatagtaataatgataattaagactgagctagcagatagaaatcctagttattggccagcagcattgtaattaatataggtctctgtgtgttattggggccctaacatgccggcggaactcaggcggctggcagtaagacttattgttacagggtcaagacagggtttctctgtgtatctctagctgtactggaacttgctctatagaccaggttggcttcaaactcacagagatccctctgcccctggagtgcttggattaaagtcatacgccaccatgcctggcttaatttaaaagaatttttaaagagaaaatggaggtcagaatagatgaagagtcattcaatattcagaataagaacattaggattggagtcagaggacatgaccacagaaagtgccatggttgggagggttcacagaggatacagggagagctggaatcagaaaggattacaaagtcctcactgggaaatgcctgctggctctggagctaagtctgtgggatataaaagaacaaggtgggaaagtgggagcagagaagcaaaaagtgtaaggtctaacattattccaaaagaaaaacattaaaggtgtgggggggatgagatgcctttgtctgtatgtgcacacagccctctctctggaagacaacaagagagtcatcccaggactatctccatggagagggactggtgactgaggacattatgtaactattttagagtccgggatggacctcaggtcctcttgcatgctaagcatgtgctaagcacgtgctcttccatggagttacatgcctggttcagcagtgaacttttataacttttgtgaatgtgttacctaacttttaaaaaaggaaattaaagatgattaaaataactaacaacttgcctggcgttggtggcgcacgcctttaatcccagcactcgggaggcagaagtagttggatctctgtgagttcgagaccagcctggtctacaagagctagttccaggtcagcctgcaaagccacagagaaaccctgtctcaaaaaaacaacaacaaaaaaccccctaacatcttaaactgtgtttttgttgcagaagccagtctgctgctgtccttatcatctcctctgcctggcagtgtcaggcagttcccatcctcgtgcctgtggcccttcttccccagtatctctagaaccttatctccttcttctgcatagagagaccttcagcctcctccagttagccagggacttcctttagcctagacacaagcagactgtcttcaagtccctacatctgccaggccctttctcagagtcctcaagttcagataagacctgttacatcacacctgtaatctcagaatttgggtagcttagacaggaggaccttgagtttgagtacaacctaagatagacagtgagaccccctttttattaaaatgggggctagaaagatatcttggtcagtaaagagcttgccttgtaagtgtgatgacctgaatttggatctctggaacccatgtaaaaatcaaggcatggtgttgggcactatattccaaggcatgctgaggtagagggcagagcaggaagagtcttggagctggatggtcaagtagcctagcctacgtggtgaagttccagttcagagagaccctttctcaaacaaaaagtgaaaggagagtgcctaaggcatgatggcagggttgtcttggaccgccacatatgctggcatgcatgtgcacatatacatctgtgtgtgcacacacgcatgtaaaactcttgaacatttgggggtgagtcaaatgttcactaaggtcaaacatctcagtcatccacattgacctctctaaactaatgacctctcttcacaaatacagcaaatttttctccacctccaggcctttgctgaatacattttcatgcccagaatgccctggagaactccaacttggccttcagaatatcaccatcactccctctgaaaagaattcctgaatactactttgcattgatgtggtatttgggtttgttgttgttgttgttgttttggttgtagactcttgctattcagtccaggctagtctcagactcccaatccacttgcctctaaagtgctgtgattacaagtgtgtgttgccacgccaagccctgtcaccgtagtttgtgagacttccctttacacttatgatccttatagatgggcagagtgtcaatgccactaacaagtaatgatgtccatgccttggagattccggaatggctgagtttacagttttaattttacagaggaggaaactaagaccagaagagactacccagtttgtcacagtggaagcactaggattagagcccaaacacctgaccctaaaaatgtctgtcctggctggaaggatccagtgagaagggcacagagagaggtggggtagggggaggtgtacaaagcccatattgggcaacacttgctgtgtccaggccatacctggcaaaggggctactgatgtaacctcagggttcattctgtcctgatcaaaacatggctgatatgatctggccagatccagcaggaagcagtttctacctgacggagtgcccactctgagtctcaatcctgacggtaacctgacttgacatgtgcaggaacaatcagcatacctccccgagtcactaacgattcaactagaaggtagagagataagagtaattcctagttttcaaatattcattcaaaaaaaattgaatgcctataaatagagggattaccaggatacatagagggacaattatcggtaaaaatgtgtgttcctgtaaagcacattttgtcattgttgttgacagagggtctcacactatagcccaggatgacccagaatgcactatttagcacaagttggtcttaaactcacaataatcctcctgttccagtctcccatgtacaccaccccaggctgatttttactgagagacatggactatgaaataagattgttcagtgtctattgataacaagtgctacagagaaagaaacagggaggaaagttcagaggctgctcgtggggaggtctccgtgcaggattagtgaacctgtgacaacaaccatcacatgggcacacacaccagtattgtgctctgcatttcacacgactgaccagtcctcaaatagtaccatgcaagtgctctggggaactcgtgatccagaaagtgaggctctgaaaggccaaatgatccactcaaggtagctgacattgggttttaaaccgtggcagttcacacactcaacaccgtgccacacactgctacctggatgccaaccgtagggactttggtttcttctctgagtcattgctagttctggcacagcaacccctcaataactgtgaaagcctgaggtttcaagaaggtggagctgccctccaggcacccatcgatcaaaatggccctaagacctcctctcctacctgtaggagtgagtgagatcaatctgtccagcaaatattagctgccttttcttacgtttactgtcactttccatgagtccccagtgaaaaacgagggctggggtgaagtcatattgatgagaaacaggatgtgaacctgttagcaacttaataggtagtaggtgaccacctgtttgctaaaggacagagtccagtttctttggtgcacacagagacaccgaagccaaatagggcaaagtgcacacggcaagatgaggtgaactggacccaaatgaggggccacaggtgctggcatattaggcaactatgtcaagagtgccagattgtaaagcacagaggacctagaagagggacatgggaagccccagctcaaggctgacaaggtgacaggaacccagaaccccacttccactacaccagcaggacaccggaatctaacctcagagctccttagagagtgcacagcgaggtgacaaggggcctcgaacttgcgaccccggctaggcccgtccctcaaccctgaccagactctgcggccccactcacacagccccgttccggaagcccttaagcagggccaacacagcgtggtagcggcgctttcgcagcagcgtgttgacagcctggagaagagcctgcagctgcggtggggaggccatggcatcggagaactcggtggaggaacccggctggacgcgtactgacagccctgggctccggctgcaaagcccactggcacagggagcaccgccccgtcgttgtatccataggctgagtctgccgtcactcattcagcagagccagtcacagagcacactggtctgcaaggggctgagccgctcgcactcttcggactagctgactgattggaagagaaaggagagtcggtaaccaatcaccgggactcggaagagctcacgcaggattcgcccaatcagaaggcagctttcccagggagaagtttggttcattgagaggcttaggaggagtttcttgccctccttggagttgaaatggatgacttcgggggagctgacgttggtcttacctcacacacactttcgatgcctagcagatgtcgcagctaacttctcaagagcataaatcacatgccactcttgttgtctggtgttttgagacagctttctcatgcaacccaggcgggccttgaactctgaccactccctgcccacttcccacgtgctggaattgcaagcctgtgccattttaactgctttctacttacttttaaaatacaaactctttctcgggcctcccaggaacagacgcacttagtgtttgctggccctagcctctcgtcccatatcctcccttttctccaacttggttggcttggtttcccttcctggagtagtccaagagcgcttaggacttgcacctgctatttctctgttaaaatttattgccccttgaactttctatggctgacttcctctcagtattcaggtgtcagctcaggtaccacctaatcagggaagccctgcaggatatcccacagacagtaagtagcactgctcacagccaacttattagctcaggtttttgttgttgttttgttttttgtttttgtttgtttttcaagacagggtttctctgtgtagccctggatgtccgtaaactcactttgtagagcaggctggcttcaaactcatagagatctgcctgcctctgccttcccagtgctgggattaaaggtgtgcaccactactgcccagcagacagcccaggctttctgttgttttgtttgctgttttcctctctagaattcttcacattttctaattgttattacatggactattactttcctggagccagaaagttgtttgtctagttttctactatgactccagtagccaatgtaagtttccaaaatcactaagatgttaaattatcactgctagacaattaatgagtgacatttacacataatgttactgtgtgtaaaggtattagataacacacattgaatggtggctgtatttgggaggttgttccctggacatgtgatatttacttgtgatattgactgggctagtatcagaggtcagtaaaagaagtcaactgtgttgaacctacctgttccatcaccaaaattggctctctctctctctctctctctctctctctctctctctccctctctctctctcctcttcccgtttattctgttagtcctctaaaaatagtttattagaaaacagaatctctaggctagggatgtaactcagttggtagagtgttgtctagcatgcaagaagcccccagcatggtctccaacatctcctcaactggctgtggtggcattcacctgtaatcccaggataaaggaggtgatacaagtatctcagaggttcaaggttacatacaatagcgagttcaaggccagcttgagatacataagatcctgtctcaaaaggatatggagaggctgccaagatggctcagtcagtaaaatggttgctgtctaagcaggaggacctgaattcaatcctcagaacccaaggaaaaagctgagtgtagtatgtgagcttgtaatccagtactgggaaagcaaagaccggcagatccctgaagctcactggccagccaacctagcttaatggttgggcctggggtcactgtgagcaaaccagtctcaaaaagacaaggtagacagcttctgagaaatgacatcagtgattgacatctggcctccatacccatatggatacacgtgaacccatgcacacgcgttcaaccccataaattcaaatgcacatacatatatacacaacgtatgtatacaaatagtgattgtgttgtagaaatgtcctctagtcctccacgggatgcccacatactcctgctgtcttccttaatgttgagaatggatgactttacttggtgaccaagtctccagtgattgccgagaagttccgtcacattttgctagtactcagcaccagcactgctgagcagcacggcttgacctttgccattactgatatgaagggtgtggagcaaagggtctgctcaaatggcatggaggtctgcagaactcatggatgaggcatgaaacctgtgatcacagccatgcagattccacaccagatcaagaccctgacttgaacacaagaaagataagcagaaaggaatctagccaggctctggccagtgtctacatatcaagttctgtcaagaccttggatacctaatgatgattgagacccgtgcaatactgaagtcacttccggcacatttatgtccaaggcccccacaccaagaccattggccgataaggtcacagtatgggtaaatcttcagccatatctgttaataaatagccaatatgcctacttatataatatattgttttgttttttttcgagacagggtttctctgtgtagctttgcacatcatgctggcctcgaactcacagagatccgcctgcctctgcctcccaagtgctgggactagcactcggcatgtgccaccaatgcctggcttatataatattcttacaaacacagaaatgctttaaagtgtgaggaatgtccagaccagttatgaagtgaaaactagaaactagacagttaacaagaggactcataagctggaacaccaaaaccacttatgacatgagagccttggcaaatattgaacctgtgaatttcaatttgacaactacactgggcaagagatataagagtgaaagtccagggcctgctccaagtgaagaggcttagagcagactcttcaagtcaagctgaagaaaaaggatttcacattccaagctaatgtgacacaaaactactgtataacccctgagccccaaggaaccccagagaatgctgctgcagagctaaacaccacagttcaaagaagaggaaaggggaattccctttaaagctctttcttggaaagtgtggctgataagtctttttgcatcctcgggagtagagcttggtatgtcaagaaatttcaagctatgccaattgtggtggcacacaccagcaatctcaatcctgtcaaagcagaggcagaaggatcatggagttgggtccagcctgcgctatcctgtgagatcctgtctcatccagcttattcttatttaaaaatgttttactgttgctaagtgtgtgtgtgtgtgtgtgtgtgtgtgtgtgtgtgtgtgtgtctgtctgtctgtctgtctgtctgtctgtgtctgtgtgtgtttgagtgtaggtaaccagggatgccacagtcatttgtgagctgcccagtgtgggtacttggtaccaaacttaggtccactgcaagagcatacgtgatatttatttatgagacagggtttctttgtgtagctttggagcctgtcctggaacttactctatggaccagtaagagctggggttaaaggagtgtgccaacaccaccctgagtgttcatgatcttaactgctgagcaattgcttttctccagtccctgaaaatcttttctttaatataaaaataaggaagacctctcaaactatgaacaattgatgtctccacaaccttgcagaaatcagattcaggagcggggagtcagctaggtgatagtgtttgtcttgctagtttttgatggcctgagttggaatccccagaacccaagtaaagagtgcttattgggaggaggggagggaatgggaactggaattggtatgtaaaatgagaaaagattgttttaaaataatttttttaaaaggagagcaaaaaaagagtgtttgtctagtggggtacagttgtatggctcacacccttaatcccagcactcaggaggaaagttatctggctagccaaggctcataatgaaaccttgtctcagaacaaacaaaacaatgacaacaaaataataataataaaaattaatctgaagaagagcacgtctgcttttagtttcacaggtcaccagagataattaggctcctaagagaacatgaaaaatcaacagataagcagagattatagttgcaattcaggcacaggctttcaagaaaaaaaaaaaagacacaaaatttaaagctagaaagtagctatagagaacttaaaagtattatttaaaaattatgtgcacttatatgtatccgtgtgcgggatgtgcatgtatgtgccagaagtgacccatgtccctggagctggaactacaagttttgtgaactttctgatgtgggtgctgggaactgaatttggatcctccgaaaaagcagtgtgtactcttaactactgagtcatttctccagcccccagaaatattttttttaatatagcaaattaggtgatcctagcacttgagaggtagaagctagagtcaggagttcaaggccatactcagcttcatagtgagtttgaagttgcctaggctacaagagaccttgtcacaatccccacccccaacccgtgtgtctgtctgtgtgtgtgtgagagagagagacagagagacagagagacagagagacagagaggacagagacagagggagagagagagacagacacacacacacatacacacacacacacacacacagagagagagagagagagagagagagagagagagagagagaatgtgtgtgtgtaatttggaagaacaaagctgctagaaatttcacctgtaactacatggagatcagtctgagttgtgacatatggcccagtgttgggagcagatatttggaaacaattctgtttggcaggtcttcctgtatattatcttttggtaaggcctttcttaggtagatgaataagtttctacctttccaagcctcctaatgtgctaaaggcaaaaatccattgccacaatgagagtatttattacctagtgacccattttcattttgcacaactctaagtcctcagggcacaccatttatttacctttgcccagaaaaaaaattgcactacatgtgctatctatagaatactaactgggtatcagtttcttgcatgcctttgtgtgtgtggtgctgggtgtcaagctaaggggttccctgccacagaactacatgcacagcccttgaatactttgttactagtcttgttcttatagaaagtctgcaaggtaagtgctatgaaattgtcagctaacttacaggaaacagaggaacacagaggccaagtcacttgcccaagatacaatagctgttgaaggctagaggagggatttaaatccaggccacccagcttgcctctgaagattgtgatcttagccatatattagtttgttagtactgccatgccaaagtaccacagaaatctattgtaacagaatcctggaaactggttgttaaagaccaaagtgttgttagtaggtttcatctctctggagatctatctcccttgtttttaaagaaagtacctttaaggagaattctcacgtggtcaccctttttaaaaactagattcctaggcagctgtagtatgtatctttaacctcagcactggggaggcagagaggcaggtggatctctgagtctgagttccacctataaccagagctatagaatgagattctgtagctaattctgtctctaaaaaaattcttaaaaaaataaaaacatttatatatttatatgagtggagcatgtatgtgtgccactgaatgccactggaagttccagaacaacttttaggagtcagttctctgtaagcatgagttttctgtctcgggtctagtgaaataattacatccttgccttcagttctctcttccaccacctaggtccaggggatcaaactccagtcctgaagcttagtgggggacacctttactcactgagctttgtgcgtgcgtgcgtgcgtgcgtgcgtgcgtatgtgtgtgtgtgtgtgtgtgtacatgtatatatacatacacatacacccaggtcctcttaatcactgatccatctctttagctcccattttcttcatctgattacattgtaatttcatttacttccttagtgcatatatgaacacttgcaccacaatcacgtatggatttgagaagatagctggcaggaatcagctctctcctttcagggcaagtgtcttcttcccgtgctgagccatcttgtcagcctcccgcatccccgcccccaccccacccccagttctcaaggtgctctcaaactgactctatagctgagaatgacttgaagttgcagttttcctgcctctacctccctagtgctgggattataggcaagctaccatgcccatttatacggtgctgaggatccacttggagcttcctgcttgctaagaaagcaccaatcaaactataaccccagtccccacatacagaagaaacatactggactgggcctagaaactcctaggatgggggcgggtggtgaaagagaatacaccattctgtctgtaacaactgccaggccttgtttcctcctacgaacaccaaaacgtaaggatgcaacattgcttgacacacattcattttctcccctcaacctaggacccagatgtaagttttgtcattctgggggtaactgaagtgctcactgtgaagctggtcattaaaagtttctcagtcttttccttttccctagttggcccaatgcctggaattactacattagttgcttcagaggttcagtgccaactaggtagccccgagggagtaggacatgggactgctagagattgtgatggaggaagggatggtgggaaagaacggaaggtctgtagaggaagcagtctgactgggggaacccatcagtgttagggctttgcatccccgaaggctcatggacctgttccacccagcaggccatcggtcaagcacttcttggtagcctctgtgccaagccttgaggtccaaccagaatggatgcagtacttccctgattggtgtttggaaaaaagagctaactgccaatagcaagaaatgattacctggcggggatagtgccagctactgtgaccgcaacaaagggttctgttctaccctgggaggccacagacaatctctcaggggagcaagcaggcaggttcctaagttccatggaggacaggaaaactgccctttaggaagatgggacagcaagcagcacaggtgtgcacgtgccctgtgtggagagaaggagctggagagctgccatggctgtgctgccttgtgtttgtggagctttcactgtctgtcactctcagaacaaacctaaagtctcacatagtctcagctgcacttttacaattcttggtcctgagtgtgtcgggctagaaaagggtggggctgcacaaagagccttgcgaatgctaagcaggttagctgcccttggcctttaatttggacctcagagcctttgtatttgccattctctccagtttcccttttatcctttcaaaaagctgactccattgcctttcttgggtcatccacctcctcagagaggctcttcctgacccaccctgaataacatagcttctcttcataccagaataaagaatgatctgaagtcatagcctctctctctcctcattcccttatttacttccttgtctacaaccatctctcctgctggattataactgcacgaagacaacttttttttgtctttttttttgagggggtgggggcttgtccaggtttctaaaatctagaacaagtcctggcatacagtagctgcttagcaaacaaggtaaattaaatgaccagttatattaaaagggtaatagtgataaaaagctatgctgaacaaccctttaaggagagatcagaacctgaggccaatgggttaatgaatatgttaaagataggaaagaaggaattctggtcttactcatgcaaagggtattgggaaggaggctttagggctctggatctccaagagtcccaggaaaaggattggcctgtggagtctctgaggagtgtttttgtggtggtggtagctgtaatgataaataaaaaagaaaggcaaagtgggtacctttcggtgggccctgccaaggtatgccactaaggaaacatgtccctcaaaacagaggtagagcaagaggtttattggtggggggcgtgaaagactgataggctatgttagagtagggacaagaagtggcaagagaagaaagaggaaacagagagaggaaagaggaggcggagagaggaaagaggaaacagagagtggagagagggggcagagagaggaaagaggaaacagagagtggagagaggggacagagagaggaaagaggggacagagagaagaaagaggaaacagagagtggagagggggcagagagaggaaagaggaaacagagagaggagagaggggacagagagaggaaagaggggacagagagaagaaagaggaaacagagagtggagagggggcagagagaggaaagaggaaacagagagaggagagaggggacagagagaggaaagaggggacagagagaagaaagaggaaacagagagtggagagggggcagagagaggaaagaggaaacagagagaggagagaggggacagagagaggaaagaggggacagagagaagaaagaggaaacagagagtggagagggggcagagagaggaaagaggaaacagagagaggagagaggggacagagagaggaaagaggggacagagagaagaaagaggaaacagagagtggagagggggcagagagaggaaagaggaaacagagagaggagagaggggacagagagaggaaagaggggacagagaaaggaaagaggggacagagaaaggaaagagggggcagagagaggaaagaggaagcagcgagaggagagagggggcagagagaggagagagggggcagagagaggagagagggggtagatagaggagagagggggcagagagaggagagagggggcagagagaggaaagaggcaagagaaacaagacacagagaggtaagagaagaaagtggcaagagggcgctgtccctcaagagcacttttaagggtgcacattgttcagctgggacctccagctcccttctgccccatccttgcctctccaaaccctgtcctcttggaaaaactgccaaaaagttccgcattcctgcggttatggcagctcctcccctgaagcccccagctgcccaagaccccacccaggcaccatgcttgggcattaacccagcttgtggcagacacatcatcaccccttgactacagggcacataaacgcctggctttagtttggccatgtgattttttttttcctgccccttcccctttcccaatctctggggactggaggagtcactctcaagttgcttcaccaaaataaacctggtctttttcctttttaattctgcttgatctggcatactgagctggcggagaaacctataatcaggatataggaagcctattacacatgccccatagatggcggtggaaaggcacctggtgacaggtgatgagataactgcttggtggcagaggcaggctgctgttgcggcagaaactaacattcctcccttttgttgcttataaaaaggtgaggaactgggaagggttagcagtggggcaggaatgagaagatcgtgttcttgagactgcttcctgttgcctgggggtgttagcatcttgcttagtggcataccttggcagggcccactgaaaggtatccactttgcctttcttctttatttatcattacgttggtgtcgagactcacatacgctctcctggcatttggtctggtcaggctgggatcatacacctccacccccacccccgctccacctacaacaaatctgctttctagtttaccgctggctctgccttccattcaatactggcaattggatctctggccaggctttccacctcagaccattcccctggatgtgaggctttgtttctcgagcactatcctcgccttctgacttttcctgaagtcctggttaccaggtggctgtgttgcactcggtctcttagcccttgggccctgttcttgtatgatgactgctctgtttggtcttcctctgagtccagggatgcccgaggctctcaggtttgggacttctctctgcctcatccttggggcatcctgtatcatatacctcactcatcgcgcccattacgatgtcttttggagaccctcttaccactcttttcaaatcaaatctagtctcactataccttggaccaggtggtcagagaatggagaaagaattcttcactctctttctttgctccaagacctactcgttgctgtctgctctcctctaaattctgtaaacgtcctgtctgtatgtttgttgcaacgtgggagtcagagatggaaaggccggcttcttcttgctcagcacatgccagttctcctttgcagtgtctgctgacctaaccctcagtaagacagacatgccagctccaagcagctctcttatctcctccaaagaagatatttgggcacagaagcttgatttaaatatggcaacgctgaccactgggcaaaaaacaaacaaacaaaaaaaaccccaaaacctgccttttacttcaactgctgccaagaccctgtccatattgtggacaagcagaccaggacattgggaaatcaattgcccccctttgcctagacaaggtaggctgcttgaccccaagttcctaatccacaggaaagtctgtcagatattctgggcctggtagccgaagactgatgctgccctgagactcttcccccaatgaccacattggaacctggggtaggtgtctaggtcaccagtaagtctctctcattttaaaaatatttatttacttagtatgtatacagcattctgcctatacaccaggagatggcaccaggtctcattatagacggttgtgagctaccatgtggttgctgtgaattgaactcaggacgtctggaagagcagccagtgctcttaactgctgagctattgctccagtccctgtctctgttatttttaatagattcagaagctgcttggtctgcacttctgcttacttgggtgaaatttatccttctcagaactctaacagtatttgatgaccaggctaatgatagctttgtcagtttaactacagcaatcatggattcagctggcttctcaattctctttgtgtgcaaaattcaggccacaggcctcactttcctagagctactattaggtctagacacagtttaccttgttaccaggctctgaaaagagataaactcacaaaaatagatttcaatgtttttactattcctttggttttactattcctttatttaataaaactcactctacaatgactgctctcagtaatcaaccacctgtttcccctggtaaatgcttagatagaaaaaaagtgtaaagtttatgtgaagatacgaaggcttaagttgtaaggatctaagaaaacgatttagggcctaaggtgttttaagatgtataaatccgaattataaaggtctgaggagacagggtttctctgtgtagctttggagcctatcctggcactcgctctggagaccaggctggcctcgaactcacagagatccacctgcctctgcctctcaagtgctggtattaaaggcgtgtgccaccaatgcctgcaaggtctgaggatgtaaatgcttaaatggtgatttttttttttttagaaaaggtgacttaagatgtatggaaggatgaaacgtgttaggcttctttctgtggctttctactgttatattaagactccagaagtttatagtcttaacattaatcaatggatttcagataagctgctcctctagctctggtgaagcaccactactatatcatagtcacaaacccaagattttaagtcctctttggttgttttctaagtatagatttaaaagtgcttctcatttgctaaaaacttctgtgtaatctatatatacccagtcttctggatagagtaaagagtaggaatgcttttaaccagaatcatttttgggtcccctatgaatcaaaggcgtgagtctgccttttctacaatgtggacttcagtatagattacaaacaatggaaatgctaatgtttctaaaactaatctctttttgtaaactcaaaaaaaaaaaatcctgtaagctccagggagtcaaagtagatccacctggaacaggcgaaatgaactccaggtaagtactgtcaatcaacagcttaaatttccccacctactgcttgttcctgagggtgggatctcccccacttttccctgatcttgggattcccctccctcaatcatcaggacctaagaaaaaaaatccccctggaactttgtagctttatcttctgctctgccagcgtcctgccaggtccaggtgtcccctcaaaacctgcatcccgggacagcttcgaagtgcctagcgccaagtggtctaacctcacagactgcttcaactaggcctgcactttcctaactcctagcgctggagatgatcccacaaagcctggacaatgagcaaaacagccagctttctcaggtcccccaaagatgctttgcccccagacaacaggaagcagtccttatccctgcctcacttgctaactcttcctagttcctgatctttttataatacacaatagggaggaatgttagtttctgcaaggcagcagcctgcctctgctgccaaagcagttacatcatcacctgtcaccatcagctattcaacatgtgcaccccttaaaagtaccctccagggacagctcactcgcttgcctcttactcctctctctgctcccccattcctttctgcccccccctttcttctcatgcctcttcttgtccccactctgacatggcctttcagtctttcacccaagtccttcccgaaataaccctcttgcacagactctgttgcttgcagcatgcttgcttagtggcagaccttggcagggcctgttgaaagtgacctacttcaccttcctttttatttatcggtacagtagtgatggctttttgttgttgttgttctgtttggagacagggtctcactacgtagtcctgacatgcatagaactttctctgtagtgtcccaaaagagaggagctttaggtgcatttcttaattttaggagtttagtgaagagagtgaaaattgtggtttgtattgattgttcctttggctgaggcttaactgtgggaagcaaggaggatatttggagtcaaattcatggtagttcagtcttagaacaacatggctatgatcatagagaccatccattgttgatggcatctctctgtttcttctttccctgtgtgggcttcctccaacattcccttgttgtccaagggcaacagattgacatccctactgcacattgtagttaaatatttttttaagattttatttattatgtatacaacattctgcttccatgtatatctgcacaccagaagagggcaccagacctcatgaaagatggttgtgagctaccatgtggttgctgggaattgaaagcaggacctctggaagagcagtcggtgctcttaacctctgagccatctctccagcccttgtagttaaatatttttaatttttaatgatttattttcatttatgtgcattgttattttactgcatgtatgtctgtgtgagggtttcagaccctggaactggagctacagcaagtggtgagcttccatgtgtgtgctgggaattgaactcagggtcctttggaagagcacccaatgctcttaatcactgagccatctctccagccccatagttaaatatttttaaagattgaatgtctataatatcaaactaccctctaaattcctaactttctacccataggttaacgcatctctcagccatcatcagagaactctttgtgtaatggatggcagttaacccagaaactcacaactggttaaaatgtcagtagtgtgcccagccacaggtgggaaggacctctatctcctatctcttcccactaccaagactcatggatgaggggggtggaaagatattctaagagccagaggtcgggaaggactggggtgaaagagtgtctcagaaatgacaggcctatagcacttacaaactcagaccagctgcagttttgtctgcacaggatcaagctaatcagcattccagaacgcctgagggaggagctcactattcccattaagggctgccttgggagggatagtcagtttcttttaagggtgtagtccctggtagaccatgttgcagtggataacccaacaccaatcaatacactggcagacacattagactcggtggattataaggaaaacaagagaagccttagagatggctcagctggtaaaggtacttgctatagagcctgtgttcaattccagggtctcaaatagaaggagagaatcgattcctgaaggttgtcttctcatcttcacacatgtactgggtgtgtgtgtgtgtgtgtgtgtgtgtgtgtgtgtgtgtgtgcagacatttgccatgtgtgtgcgcacacacacaaataaataataaatgtaaaaagaggacatgaggggttggagagatggttcagtggttaaaagcattagctgctcttctagaggacctggattcaattcccagcacccacgtggcagctcactccaattccaggggatccaacaccctcatacagacaaatcaccaacgcacataaataaacaagaggacatgaaattggacgtgggagtgtgttatgataaagtgtgtggggagccttggcgaattccatggcagatgagggtgactggagggggggggggcgacaaacatgccaggcagacagagctttgtgagaggttttattagaaagggaaaaggggggaaggaaagacaaaagaggtagagacacagagacagagagaggacagaagagggagacaagaaaagtcctgctgccccaggggcagaaaaacaataagtggcgggggggggggggggtgtctttcttttaaaggggtcctttgctcctgagtgcagaccacaccaccatggaaccctgggctgtccagagtactgcgtgagtgcattctgccaggtgacaggagcaggccagcgtaatgactgaatccttacagggtggatccccacgaacttgggatagggatgactgagatgggtataaggtctgtgatggcaatggggtctcagagaatcagggtcgagggatgtgaataggagtggaggtcccctcaaagctggaaatcggggctaagaagagccttaagggaatctaagagataatgaaagattgacaccaggcagagatgaaaatcgttttgacaaggctgctttccaacttacgtggcacagttgcggggtgtggggtgtcattttacagttgggtaatgccggtgaggttggttggtgttgcaaagttggagaatactgtgtgcagcgataatgaatggggttcgtgtttcagaactagggccggtgtcggctttcggaggnnnnnnnnnnnnnnnnnnnnnnnnnnnnnnnnnnnnnnnnnnnnnnnnnnnnnnnnnnnnnnnnnnnnnnnnnnnnnnnnnnnnnnnnnnnnnnnnnnnnnnnnnnnnnnnnnnnnnnnnnnnnnnnnnnnnnnnnnnnnnnnnnnnnnnnnnnnnnnnnnnnnnnnnnnnnnnnnnnnnnnnnnnnnnnnnnnnnnnnnnnnnnnnnnnnnnnnnnnnnnnnnnnnnnnnnnnnnnnnnnnnnnnnnnnnnnnnnnnnnnnnnnnnnnnnnnnnnnnnnnnnnnnnnnnnnnnnnnnnnnnnnnnnnnnnnnnnnnnnnnnnnnnnnnnnnnnnnnnnnnnnnnnnnnnnnnnnnnnnnnnnnnnnnnnnnnnnnnnnnnnnnnnnnnnnnnnnnnnnnnnnnnnnnnnnnnnnnnnnnnnnnnnnnnnnnnnnnnnnnnnnnnnnnnnnnnnnnnnnnnnnnnnnnnnnnnnnnnnnnnnnnnnnnngccctgacccccgaggacttctgagacccactgtgtccctagagctgcggtgtggtcctactaaatgcagagcagggaaggagacgccgcctgtgcgcacagccgagtctgcagagaccacaggcccaaggcagtgaacacagggcaccggtctgtgctcccgagtcagaacccacgacgccgtgagcctgcacgggccacgccgctctctgatccgactggatcctgtcccgtgatgtgcaggctcaccgaggtggctgggcctcgggctctggagaaagcgagctctgagcgccaccctgtgcacccgctggagttgagcgagaaaggatagctctagagacaggagtggagctgggcacggaggtcgccgcgggggtgcagggtcgggtgagccgctggagtagacacttgtggacagggccggcagaaggaagcggagacttgcacttctctagatctcagccagttctcaccacggaatgatgaggggtgccttttgctatcgacgggtgtcgtttcagtgggtctcactgaaccagactccgcggttctcaccttccctcattattaccccatcccactcccgcctccaaaactgtgggaaagaatagtaaaagaaggtagctcctccagccaggtgtggtggtgcgtgcccgaaatctcagcgcttggaaggtgttagcttcggctacataatgagtttgaggccaacctgagcaccgtattcgcgcaattacattttttcttacagggtttctctgtggctttggaggctgacctggaactagctcttgtagaccaggctggtctcaaactcatagagatccacctgcctctgcctcccaaagtgctggagcaattacatttttttaaaggccatgaatatgaaggagagtggagaagttatataggagggaaatcgaagggaatatagtgatcaaattataatctcaaaaataataaattattgggggttggagagatggctcagaggttaagagcactggctgctcttccagaggtcctgagttcaatttcccagcaaccgcatggtggctcacaaccatctataacgagatctggtgccctcttctgctgtgcaggcacacattcaggcgaaacactggatacataataaataaatcttttaataatattaaaaataaatatcttccagaaaacaaaacagacaaaaccacaaaacaagaacccaaaaagaagatggcaaagacaccccaactgtgtgttctgtgaagaaaatagcagggatggctggaatctgggtagtggggttatgggtgttccctcttggagggcagtggggtattgcattgtttcagtgttcatgcgtttgtgtattggataatgagaaaagagagaaatcgggaagtgtagcttcactggccttggaaggtctccagcaccaaaataaataaaatttccgagtgagagaaggacagcaggtgtgcattgatccaatgggagggcaaaaggaccaggtggtggaagtggcatttgcaaagccctggggagagcaagatttcccgtatctcagttcagcatataacagctagagaaaagacctccactgatttgatgatgcttctgaactttatcttgggatcagtgtggtgctaagaaaaggttttcatcaaggcagccttatcatctgatgtatgttttataaagttcactctggcttctggggattggcctggagggggctgaatggcagcagggagggagtgaggagctaggttaggcaactgaggggaaggaaagagtggatttcaaatatatttgggagacagaataggttagatttgccagaagtctagaaatgtcaggaaggaagcagtggatgagatttggtggggtgcccctaggctcttggcttggaaggacagtgccctgctgttgtgcttgtagtgatgggtgttaccagaagagacagaagtggaggatagcctgtttaatttggggttgtattttttatccttttttatgtacatacatatgtcacagcatgcctgtggaggtcagaggacaacttgcaggagtcatttccctccttccactgtctaggtcctagaaatcaaactcaacttgccagatgcctctacccactgagccatctcacaggcccaagtattttatcttgaaaaacatttttttttcctcctgaaattctaagacaatatggagtggtcccaagaactgatttcccccagcttgtgcttttatgctgatattattttacactagtgactctcacctatcagtgtggaagaattccattgctatgagctgatcggtttcagggatccaagatcctagctggtcctttccaagccacattctgcatcccccccccccattctccctgcatccctgactactggcaagcacgaatctattcctcacctatgagatgtcgtctttgcaagactattatgtaagtggatcttgcctttgagacatatattttgttcatcaattacctcaaggtgcatctagctggtgtgtttgttggtatcctggaactctctttgtagaccagactggcctggaactcacagagatccacctgtctcttctggtattgaaggtgtgtacctccaccatctgccttaactggggtttctgtctgtcaggacagccactacttcccttcccagctgttgatggtcaactgatggaggcaaagtgcatctagttcccatttaaccacaaaagccttcatcaactcaaagagccccacccaccctgcataaagtccacttgccttcctgccaggatgccgctctgtgctctctgaggcagcccagcactttgtcccctagtaaaactgtcttcctaactatggagctcccccctcacagatactgacctgcactgtactgggacattgcagacaggatttctcacttgggaagtgaggtaacatcaaagggtattgatgctaaggttttggtaccaggtacatcctattccccaccctcttccctggactcctgccgtaaatttcctccccgggtttacaagggcatgagaacagagctcacttttgctacacgggcactgattctcttcacactggacaccgtgctatctgtctcagattctggtgcctgaagtctcctcagagcccctgccatcccattggccctctgtccatggtgttagtaattcttctcataaactacttagcttttatctctgtgtcctcttgaacctcctgactccatccaaaacctaacaatagaaaagggttggcagaagctgtgtggcagagcatgagccccaggcctgtacctcccaagatgtggaatgagaccactggggactggctagaaggtgcaatctaaacagaaggaatgcctcaaaatccagacagaaggaacacctcaaaacagctgcctttgggggtgggcagtagaagactggaaagaaggaccccagcaagtagaagagatccaagaagggtggctcctggagtagggggtggttcttggtgtctcaggcactgttgggtggcccttggtggaaggtgagagcttgagtgtcactagagggaatagagatgatggaagttggcaagaagatgtgggcacaggcagatattttgaagagtcaacatcggatatttgatgttggagggacagagatgaggagaaagaatgcaaggaaccttgtggggtgtgagtgaggaggaccagcgaacgggatttccaaagggctctgtgactggttagtctccagcaatggctttgagacattacaaaattgtagaaagtacaaaggacggtgatctaggggtgccacttggcccagaagaattctcgattttttttttttttttgatggatgggagtaggtcctggacctctgtacatactaaaaccttgtacatgccaagcatgtgttctgccatgaggcatgctctcagcttcttttcccagcttttttgtgttccagtccctagagttcatcctcacgatcaagggtggtgtgtagacttccatgtccttgttctgggaagcagagttggggattgggtaaagaagggcactacgtactagcagcttttaagacatcttaagatggctcagtaggtaaggctcttgccaccctaattatctgagttggatctctggaacccacataaagacagaaagagaactaatgtcacagagttgctctctgacctccacgtgtactgtggtacaaacaaatctcttggtttgaggatgcagctcaggtggttgaataacagctcacacccacacccacacctctcccccctcgcaccaaagccctgggtccattcaccaacaccacataaaactggttgtggagatgctcacctgtgatcccagcactgagagagtgaggcaggaggatcaccttgaactcaagagcaatttaacccttcataatgagttcaaagggggctggagaggtatctcagaggttaagggcactgactgctcttccggaggtcctgagttcaattcccagcaaccacatggtggctcacaaccatctgtaatgagatctggtgccttcttctggtgtgcagatatacatggaagcagaatgttataaatatgataaataaaatcttaaaaaaatgagttcaaaggccagcttggactattagagtgagaccctatctaaaaaaaaaaaaaaaaagaaaaaaaaaaaagtgggtaggtgatcctttgagaagctttcttttttgttcttttgttttctgaaacaatgtttctctgtgtcgcctggctgtcttggaactcactatgtagaccaggctggcctcgactaatagagatcacctgtgggtcgtgacctctttgggggtcaaatgaccctttcacatggagtcctaagacaattggaaaacagagatatttacattatgattcatagcagtagcaaaattgaagttaggaagaaacaacgaaaataattttatggttggggtcaccacaacatgacgaagtttatattaaagcgaagtttatattaaaacgtctcagcattaggaaggttgagaaccactgatttagccctagctgttctggtgctatatagaccatactggcctcaaactcacagagatccccctgcctctgccccctgagtgctggcattaaaggcgtgtactactacacctggttttgagaaactttcatgtaatgccttctgccccccttgatagcacgtagccctttcctagccgcaagagaggtctaggaagagaatcgttactctgaggccatgtttccagcttcacatcctggaatctgttgcagtgaagtagagagaacatattttgggtttttgtggtagatctggcttgtgagggtgaaggtgaagtggaagctgggcccacttcctcacaggctgcatttcctgtttcaggaatggacaatcagaccgttttggctgtccagtcattgttggatggccaaggggcagtccctgacccaacaggacagagtgtcagtccaccgcctgccatccagccactgggtgagtatctgccctgcccataagtagagggtaaatgtgaggttcatggggcacgggagagaactgcctttgtgctcccagactatcctctggtgtctgaattctctccctttctccttcatgcacctgcccatgcctttctctgccccctgcttagaggatgtggggagtggcatccatcttttgggagtgtccaagagccctgatgttttgcaacctttgccctggaagtcatgtttcagcttccattctgtaaaaagagatcaaaccaatttttccagtttatgggtcaagcctctgacacttagagaggggaaaggacttctctggaagtcctgtgagtctttattaatttatttgtaactaatttctttatttttttttaagaccaagattcataaagcctcaactggcctcaaacccgttatttaaacatgatggctttaaactcctaagtagctctctctggcctagaacttgatatgttgatgtggctgggcttgaaatcacacagatctgcctgcccctctcttcctaaggtgtaggttcttattcccgtagttcttagcttcaaaagctaagagaatactatgagagtccttaagacttgggccctagctgttgtatataagaatggaagtttctgctgggcgttggtggcgcatgcctttaatcccagcactccggaggcagaggcaggggatttctgtgagttcgagggcagcctggtctacagagcgagtgccaggataggctccaaagctacacagagaaaccctgtctagaaaaaacaaaacaaaacaaaacaaaaaaaaagaatggaagtttctgatgtcagcaagatggctccgtgcataaaagtgctggctgccaagtcagatgacctgagcttaatacctggaactcacatgctagagggagagaacccactcctgcaatagttctctaaactccatgtgcaagccatggcacaattatacacccactcactaaaatgttgaagaagaggaggaagaagcagcagccgccacctttaatccaagaagtggagacatgtaggatctctatgaattcaagtttgaggtctacatagtgagttcaggccagccagggctgcaagctaagatcttgactcaaacaagcaagcaagcaagcaagcaaacaaacaaacaaaaaacaaaacaacaacaacaaaaaagcagcaacaacaaaaagcctaatctaaaccaagaaagaaatggaagcttctactagcttcctcacaaatgaagctaatgtttctctccctgaagccctgactgcccatctgtagagctgctctgattttgcctacaccctgcagtccagatggacgttccctgttcccactctgattcccatcttttggccaacatgaagggggagaaaggaggatgaggaagtcataatccattccttttttattttgttttttttttggctttgtgattgggacttcatatgtagtgcaagctggtctagaactctagatcctcctgccttaacatcctgggtgctgagattataggtgtataccactatgaccagctacacttttctctttaagagaaatctgcatagatattacacttctgtcttaccccattggtcagaatatagtcatgtgatatgctgcctagcagcaaagcaatttgggaaaaatatacttaagtaggtaatcatgccagatattgtggtgatactcatggttggttggttggtttgttttgatttttgggtttttgagacagggttttgctgtagctttggagcctgttctggaactcacagagttccacctgcttctgccttccgagtgccgggattaaaggcatgtgtaccaacaccactggcatggcgatgctcatctttaatcccagcattctagaggcagaggcaggcagatctctgaattcgaggccagcctgctttacagagtgagttccaagatagtcaagatatacagaaaaatcctgtcttgaaaaaacaagttgtggggcagtggttgctcatacttttaatcccagcattcaggaggcagaggcaggtagatctctgtgagtttgaggccagcctggtctatagagtgagttccagaacatctaggactgttatacagagaaaccctgtttccaaaacaaaaacaaaaggaaaaaaatttaaaaagcatgaagtcatgtttcccactaaaatctgtactagtttataagaagaatacaatgaatattgatgcctggtttggggatatatcagtggtcttggtaactaataacacacacacacacacacacacacacacacatacacaaattgtgtaataattggacaggtgagctacagtgtgctttaagacagcataaatggctgctgttagctatctctactttaagtggcttttcatttattcagcacacaccctttgagggccttctaggtgcccaggttataccacagccactctgataaataaaacaagtttctttcccttagagaacacacaatctggtgctagtgagaaaatggtattgatggggccagcccagaatcaggaactgtggcccgagctgtaagaagattgcctgggtatgggttggggagatgattcccagttaagagtgtttgcacaggacctgaattctagtcccagcacacacataagatgactcacaactgcctactgtaaatccagttcctctgttgccctcttctggcctctgagggcactgcacttatgtgtgggtagacacacatacacacacacacacacacacacacacacacacacacacacacacacacttaaagcatacaaacaaatctttatgaagacttcctagaactgatgagccttgcagcatgagttgaactgagatggaccgggaccagggtatagtggatgcagaggtatgagaagtagctacatgacccactggagactgacagtcaattcagtcaagatagagtctgtatttctcaactttggagtgaagtcactgtactgcttccatatgccaaattatttgatgcctgtctgcacatggctggctcttcctgaaggttcctgttgggctctgaacgttcctaggaagcacatggttggtgctcaacacctgcatggcaaggcacacagtgttttcagacttgctgttcagatgccagctgtggtatcgcattcttcactgtgatcccccctgactcattcttgcttttttcattactccactccatgtgtggcccacccaactactggcctaaccctagatgacgaggatgtcttcctgtgtggaaagtgtaagaagcagttcaactcactgccagcctttatgacccacaagcgtgaacagtgccaggggaatgccccggccctggccaccgtctctctagctaccaacagcatctacacaccttcagcagcacccgctaccgtccagcaggccccgcctcctgccaaccgccaggtagccttttgttcctttgtttgttgattcctttagaaggtctctttctgcacacactgtcctaagtcttggaggaatggtgctgggcaggactgacgatgtatctacgttgtggtgttggatgagatgcacaaagatgggcatgttttgctgggcatggtggtatatacctgcaattctgacacccaggagtctgggccaggaggatcaagagtttgaggccaccctgggctgcagcttgccaggtggcagaaacgcgccttcctgagtctgcccacttttctaagtcattcagaaaagtatagattcttttcttcactaatcccttatctaagtatgcttttcacaacatacttagataaggggtttccttattcttgctctgatgcttcgtttccaccatgtggctgcttgtccgccgtgtgtctgatctctgtgctgactttagtggtatgttttgttttattcttctttcctccattttcttcttctaacaagttgctgatatttacagttcacctgtaaatgtgggccctgtaggctttttcttcctcttttcttcctcccgcttcttgatgttgttcttctttttggttttttgagttaggatttctctgtgtaaaaggtttggctgtcctggaactcaccttgaacttgcagagatctacctacctctgcttcccaagtgctgggataaaaggcatgtgccatcaactgcccagcaaatctctaaataaataaataaataaataatacttttcccggggctggagagatggctcagaggttaagagaactggtcgttcttccagaggacccaggttttattcccagcacccacatggcagctcacatctgtctgtacctccagttccagtggatcaaatgccttcacaccaatgcacataaaataaaattaaataaattatttaaaaaaaataatacttttcccagtctattaaatgctgagatggggtgggagattttaccatattatgtgtggtatttggagcagaactttgaagaagtgacatgtgaccagaggttcaagaggcgagggagtcagatatatatattgtgttcctgcaaaggctctgagattgaagtgtactgaggtgttccaagagctgcatccaggagatgacagggcggctgggcctgagtgagtaagggaggggtcagatcacgtgggccctgagtgagtaagggaggggtcagatcacgtgggccctgagtgagtaagggaggggtcagatcacgtgggccctgagtgagtaagggaggggtcagatcacgtgggccctgtaggcttttacttaattacaggcgccatggagagtgttgagaagagggacctagactgacctacacttgccctatgcagactgctctgagttcttgcttccctagaacagaaggcaggaattttattgctggaccaaaggtctgtgcctttcagagagatgtgacccctcctcattggtagatgactaattggagtctcagaaatgtagactggcttgccaagagtcaagtgatgggagcagctaggtggaaaggctccagaacctggatttttcattctgtggtccatgctttttctttttattttgtgtttttaggtttattcgttttattttatgtgtgagtgttttgcctgtgtgtatgtatgcttgatgcccttggagatcagaagagggcatcaggtcctgtagggagagactctgaatacttgtaccactgaccacgcccaaggtatggagaggggtaggataaagagcgaggaggagaggtgctcactctttcgaggttcaagccaggtctcggagtgcggagtgcgtagtacgtctgagactgggctgctcggagtgctaatctgattatcggctacacgtgtgagttgttttcatggttattatttataatatactattaataaccgtatcttgcatatcctttgggcatggtcagcagtacaggtatccagggtctctccctacaaggtcccttggaactggaattacagctggttatggaccaccatgtgggtgctgagaatcgaacttgggttctctgcaagagcagggagttcttttaaccactgagccatttttccagccccttgtttttgtttttaaacacagtcttcctatgtagtcccggctggtctaaaatttactgtgtaatatgttaacctcaaactctcagacattctctggcttcccaggtgctaggatttcaggtgtggaccctatgtgtggcttgaacttaggtctttcacatcactcttcagcttccttatagagcctcagacatgctcccccctctcttgctcatctagatctccacgtacatcacagtgcccccgtccccactgatccagaccctggtgcaggggaacatcttggtgagcgatgatgtgctcatgtctgccatgtcagcctttacatccctggaccagcctatgcctcaagggcccccacctgtgcaggtaaggtggtgggtgcttctcataggggtctttttttttttccttcttgcaatgctggggactgaccccagggccttatacatctctcaagagtttcattccaaatctgcaaattaacgcctatgaaatcagaatactgtagaagaaaattgctttagctccagctctcctacatggaagggactagctgcctactctggctagcccagctgagcaatggagccgtgacaaccacgtccagctattctgagtcctgtttttattcatggtccattagaaaatatagtggctccttggaattttccagtacacataggtgaccagccaccaagaccagatttcaggcttccagaagggaaggagctggtcccctggaccccccctatttgaacattctagtaagtggctgctatgtgatcagtatcctgggaaatgtcccaaagtcagtcttgagtcaccaatcaagagccagtcctgctttacaaactttttttctttttctcaatggccttgttagacctcctgggctgaatcatgtgtgcccaaggcaggctagcttagagaagagggagcgaagccccaggccgacatcccttgacattctcccaggtctttgctcctttccctgtcccagtactgttctctgagctgcccggtgagttcctgtcccttccacatgctgactaaagcctttcaagttgatgaaacagacacttcaatgctgtcattttctcttctgattgcagaacagcttgaacatgcatccagtgcccaactacctcacccagcctccaccgcctcctccgccccctccacccttacccccacctccccagcctccacctcctccgccccagaccctaggcccttctgggcgttccaaccctgttgggaacagtgtggtggaggtgtacagtgctgctgcacccatggcaggaaatggaacagtggagatccaggctctggggatgcagccctacccgcccctggaggtgagcagaggcagcgtgtggtggaactgggcacaatcgtgccagacactgtgctaaggccactgtgaagatcaaaagcagacccagccttctcatgagtgcctgcgtcagggagaggaggactttcaccaaagcgggcagtctacagatgggacacgcaaaccgtgttagggcccctgaggggcgtgtaacacagtctgggtttaaacccagacagctgagctacaaagttacttcatgaagtttgttctgtttctccctccctccacccccctctctttccctctctctatgtgtgtttgtatgtgagtgtgtgtgcatctctgtctgtctgtctgtctctcttctttcatttagtggatgggggcatatgtgtggaagtcagaggacaatttgtgagagttcagtctccttctaccccgtgggctctggggattgaactcaggtcatgaatctcggcatcaaagacctttacccactgagctatcctattggcccagttcatgaagttctaaggggtcttgggagatctgagtgagccaggtgcaagcttatgtgataatggaatgtcagtggttgaacacagctagggctacagtgagggtccattagggtccccttatcctgtcccttctaaggcttttcccctcacagtgctatccttctaggtgccaaaccagtgtgtggaggctccggtgtaccccacacccccagtgtacagccctggcaagcaggaattcaaaacaaaaggacccagctccactgccccaatgaccagtgcaactgggagcacagtggccacctttgactccccaccaacgctgaagaccagacgtgctaaaggtgccagtggactcccagaaggttggccacccaccctccctgggcatctttccttggcactggcctccccacaggctgcttgggtctagtctttgctgttaagatgagtagggttgtttggtggtgtgtactggaaaacgtaaactagcattgacttcagaatgatagggggtttctttccttagaccaggagcagaaactctggaatttctgcagtgccgtcgtcaaatagccatatcacttctgttcttccctttctctgtccctagagcatggcttcattttcagggtgccttgtcacctgaggtggttgctgaaatgccagtcatcaatttcatattctagaaaataagaaagtagaggaagagaagggtaaagggggactctcccagcttcctgaagtcctatatagtcaagactttcttcatatatagtcatgtggctacgctagctacaagggaagttaggaaatgtttgtcttagccaggagcaggaaggaggcaaaagtggctaccagttacaccagttgtggtcttcccccttttagagatgtgaggtgtggaatcagagtagaatcagaaccagggaatagatgtggggaaaggaactgggaatttttttttttttcaagacagggtctctctgtgtagccttggctgtcctggaacttgatggcctcaaactcacagagatcctgctcctctgcctcccagaatgctgggataaacggcatgtgccaccactgcgcagctcaactaggaatgttttaagagcttccctttcgaccccttcttttttccttcttcctacaaatacacattaacaccagtgcatcacctacttgggatttaggtcttggttcaggatctcctcctctgtcagtcactcacagtttaatgggagagatgggtaggaaataagtgggtatttatgagtttctccagggagatcacagggtagaaaaggacacagcttacctatctggacagaaggaggtggtcctgtagggactgaaaggcaagctttccaggcaagaggagcagcaggcataaagtcctgagctgagcccatgcttgggatcatcgagattagcaaggagtccattgcaggacagagggagctctcaagttggcagatacagaggacatggagaggtggtggatttcaccatgagcagagaaagcctctgagagagttttgtctgactttccctcttacactgtctacacataaatggagatgtcccagggcgcatgctgtctggccccaggtacaggggagaaatggttggaggtttcccctatctcctcagctgggcctgactatccctctccttgtctttcagctacagggaagcccaaagcccagaaactcaaatgctcctactgtgacaagtcatttaccaaaaactttgatcttcagcaacacatccgaaggtacaggcagccttgggggccgggctccagcacagcgccaactaggggccacctgcatggaagtgaggccccttcccaggctctgtgcccatcttcaggcctgcagtgcccaggaggagggttcctcacattcttctcaaatccaagggctgaacccgcccaccgagacagaaaggttggcatgtctgtttggatgggtacccttgaactgagagcggctttgcacacacacaaggctgcctgtcttccaactgcagaagggttagcctgcaggctgcccgctgtgccaggatagctaactacagagggtccttcctccccaagaatgtggagtccatctgtggaatggtggggtgggcagactccgcacctcttcacagtgggatacgttagtatgtaggggacttagggtcagtcatggctctggtgttgggaaatttggaatggtgtggtgagatgatttcaccttaagtccctaaagagtcaatggaggaagtctcagctttggactaatctgtcttcaacacctgttcatttctgagagagaatcaagggccagtccacacaagcacacgacatctatctagatcagggtctcccaacactgcattattgggactcgggcttggggtcaagtcgtgctgactgtgctttgtggaatattcaaaattatccttagcttctgaccatagatgctaccaccacctcttccacagctgtgacagccaaaaatgttttcaaacattgccaaatgttgctaggagcaaactggacctcatctggcatacatttggcaatactagaaatgtccaaattggaacagttaacctttcatggctgttaggacttggctagtgcagctgagaagactttttttttttttcccaatgcaaaagcaaagagtcttttattgtttaatgagctaaccacattagctcaggcccagctcgggccctttacccgtttatcgcagcaggtggctggagaaggacctaagaaacagacttttaaatttcacttgtaatgaagccaactgtgactggtcccacacggctggcgtctgccttaacacggttggtgtccaccttactgggtggtgctactttggatcttcaatgacattgtttttataatcactgaatttttccattacttctttttgtttgtttgtttgttttgtttttcgagacagggtttctctgtggctttggaggctgtcctggaactagctcttgtagaccccattactacattttcaatacatagggagtcataaaaaaatggtttttcatattcaataacaaccaatggggaacttctcaaaattattttcaaagctgggcatggtagcacctacctttaattccagcactctggaggcagaggcaggtagatctctgtgagtttgagggcagcctctctctctgtctctctctctgtctctctgtctctgtctctgtctctctctctgtctctctctctctctcgctctctctctcacacacacacacacacacacacactttgctagggttcttgtcctaccaggtcctgctgcttcagttccaaatgaacacagcaacactatattagttattaaactgttggccaatggctagggcttcttattgactagctctgtcttaattattaacccatttctatcaatctatgtattgccacaagactgtggcttacccagtaatgccccagtgtgttgttactccttcagcagcatggagactctgtggcgggctccctctgcctacctttcccagaattctccttgtctcctcgtcccacctatcttcctgcctcattggccaaacagtattttattcatcaaccaataagagaagcatatgtacagaaggacatcatacatcatacacacacatgcaagcacacgtgcacacacacagtttgcttcctacttgatgccttaaaagttaggaaatctgtgatctcagatgtgaggtggccaaggagaagggctgctgactgagcggctcaagaacaggtctttctacctctggtctatctgccacattgggagaacaagtcctagtggtgttgggatgatggccagcagcgtctcttggccttcctggtggctgtgatctcctgggtagaggccatgtccctgtttctatgaaggaatgacaaataactgtgttcccacagccacacaggggaaaagcctttccagtgcattgcatgtggccgggcctttgcccagaagtccaatgtcaagaagcacatgcagactcataaggtgtggcctccagggcgcagtggtggcaccatttctcgaaactctgtcacagtgcaggtcatggctttgaaccccagcaggcaagaggaggaggacacaggtgagtgaggtgggaggggcggctctccccactcatcccctctgaagtcccaaaggtgctgtctgtctgtctgtggtactggggaccaaacccagggtctctgcactgtccccagccccagtctcattggtgttgttgctagttgggtggcttccatgacttcgctggagttcagcctactttatctgtaaaatggaacctaaagagatgggtgtgatgtacatgaatcattcagctttggtgagcccaagacgggggaatcaaggcctgactgccacatagtgagtttgagtccagtctgtgctgtacagcaggctctctaaaaagggacatggggtgaaagcaaggatgcgagtatgtaagatatgtgacattagtctaatactgtgcccaggcagacgtggacatcactcactaattagtgattatctctttctggctgagcctggatccatatgagaatccaattctttcctcccttcctctccctgcaccccccaccccccaccccaggtctcatgtagcctgggctggcttggaacttcctatgaagctgagaatgaccttgaactcctgatcctactgcctctgcctcctgagtgctatggttacctcagacctgagctactttacccagtttatttgtttgttttggcttttttgtttttcaaggcaagttttcactgtgtagctctggctgtcctgtgactgtagaccaggctggcctcaaactcacagagatctgcctgcctctgcctcttgagtgctgggattaaaggtgtgcaccaccgccgcctggctattttacccagttctgtgtggtgccagatgttgaatgcagggcactgtttgttctgggccacaggtgggccctttctgtcaagctctgtcacttgccctcagaatccatttccagtgctccaggcagttcctgtagttgatcagcacttgaaacccttggatctcggtgggcagctgctcctcagatgtcctgcaggttctcattcatccaagtcttcaggggctcctgagccaacagtcctgtcccaaatgctggttagttctcccacaaaggagttagggacttaccaagttgataaacagaacagtcattggagattcaacatgaggaccataatgtaattgaagtttttttagtagtccagcatggttggtagttctagtgctccagaggctgaggtaggaagattgtgaatttgaagccagcctaagctatataacaagatcttgtctcagaaaaacaaagcaggaggctgtagagatggcttagcagtcaagagtacttgctgttcagtcatgaagaccagagttttgatgcccgcagatacaacaggtggcttacagatatctgtaactacggctgcaagggatctgatgccccttctggctctcaacggcacccactcatacagacacataggcacacataagtgagataaaaataaaatttgagatagacttcatatattttactgaacctgatgcattcttgcttcacaaagtagcataaaggacttttcctttgtggagctgggtgtggaacctggggtccttctgttcttctacagagccacaccctgtaaatggacttttctttgggctgccagcttacaaaaaaatgacacagaggcttcttattaattatgaaagcctggccttagcttaggcttattcctgattagttcttacaacttaaattaacccatatcctttaatctacattcttttacggttacctgtactctgtactgcccatcctgcttcctctgcgtctaactggtaattccaccttttttcctcccagagctctctctgtccagaagtcccgcctatgcctcctgcctagctgtggctgtttagttttaaaaaaaaaaaagattttatttatttattatgtatacaacattctgcttccatgtatatctgcacaccagaagagggcaccaggtctcataacggatggatgtgagccaccatgtggttgctgggaatttaactgaggacctctggaatagcagccagtgttcttaacctctgagccatctcttcagcccccatttagctttttattaaaccaatcacagtgatacatcttctcagagtgtaaaggaatgtcccataacatttcttccttttgtctaaataaaaaagaaagattttaactctaacacagtaaaactacatacagtaagaataattatcagcagggtagtggtggcacacacctttaatcccagcactcaggaggctgaagcaggtgggtctctgtgagttcgaggctcacttagtgcatggtactggaggctccagcctgcaagcagcagtggtagctgcacctctatgccgccaagcaccagcctgcctgagagactgcaggactaggaagccacatccagctccttgtgcagagcttttcttagctttctcaggctatatgtttagatatttgagccctgacattggatgccatttgtaaacagatttttctttgggtttccagctcacaaaaaaaaaaaaaatgacacagaggcttattaattatgaaagctcagccttagcttagacttattcctaattagttcttacaacttagattaacccatatcctttaatctacattcttttacatggctcggttacctgtactctgtactgcccatcctgcttcctctgcgtctgactggtgattccacctttcttcctcccagagctctctctgtccagaagtcccacctatgcctcctgcctagctcttggccgtttagctttttattaaaccaatcacagtgacacatcttcacagggtgtaaaggaatgtcccacaacacacaacaccccaaagccatatggaaatattgtgtatatttgtttactgaatttttggaatttacggcacacctgcactggcactggctatcttctagatcttgcatgtcacccatgactgtggccattgtgtaggacagtgtagagccagaaccacagttcttcctacccaagcagggtgagcagccccggccacatgccagctgctgaagagccttttgttgggctcgtgcccagggactgcttttatctgacacaccagtgctctgttggagccagccctcttttgcacctgggttcttgctgtctgaactcctgcccagcactggaggccactcattaagcatacattgtagagcctattgtgtgctggccatgggctacagaggtgaaggagcaggcccctgatgtcagggagagtgagggatggcctaattagcaaagaataacaaagcaaaggtaagtggtgtggttagaaaggcctgagaggcgatctgactatgcttgggaatgttcagtttctaacacccatggagaggtcacagtatctgagtgaagatagggagtgtaacagaggtcactagctgtctctcagtcagaatgtatttcagggcctgtggatgtacctcaggatagaggatttgccttcacacaggatgccctgggttcagtccccagcactacataaattcagcatgggccatgtggtggtggcgtacaactttaatccccacactcagggaggcagaggcaggaggtagatctctgtgagtttgaggccagcctggtttacagggtgagttccaggacagccaaggctacacagaaaaactctgtcttgaagaaacaaaaaataaaacaaacacaaacaaaaaaaacctcatggagctggagagatggctcagaggttaaaagcaccagctgctcttccagaggtcctgagttcaattcccagcaaccacatagtggctcacaaccatctgtaatgagaattggtgccctcttctggtgtgcagatatacatggaagcagaatgttgtatacataataaataaataaataaaatcttaaaaaacaaaaacaaaaaacctgagcatggtggcacagacttgtaatcctagcacttaggagatagtggaggaggatcaagagttcaaggtcaccctcagctacatagcatgtttgaggccagcttggactacataagaccctgtctgaaaataaaataaaaaagaatgtatgttagtgttttagcatcttgtgcatatgctaagtatagtcctaaatacagcatgtgatagcaagtctacagtaggtgtcccaggagccctcatgcatggagtggctcctgtcctgcctgactcaaaaccttcctctgactttcctctctctctctgacttttttctctttctgcataggattgggccaaaccctgtccagcaccacacagccccaggccttgcccacggcaggtgaggatgaaggtggcaagccagaggccaagcaggtagtcctcattgacagctcctacctgtgtcagttctgccccagcaagttcagcacctacttccagctcaagtcccacatgatccagcacaagaaggagcaggtgggtgggtgtgaaagcagagggcacagctgctcacttacaagcctcatggcaccggggtcaccagtgctgcctggagagggacaggaattgggccagcctttcccatggctctttgtcctgaagataggttcctggagggtcaatacacagttgggttatgaggtttgtcatctgacatagcaggaggctgagccagggcaagcactcagctcagattcaagggctttgtgtcttgtctcaccagctctagtggctgtgttcataaggtgtggccttgtctttcatcatggattccctcctgcttcttgggaaacctgctgactggaactggctatgtagagcataccagcctcaaatttgcagaggtctgcctgctactgcctcctgagtgctgggattaaaggtgtgcaccaccatgccctgtgctctatttctgacctttgttgtgtgtgtgtgtgtgtgtgtgtgtgtaagtgccgtggaacatatgaaggtcaaaggacaacttgtgggagttggttctctcctcttaccatgggagtcccagaaattgaagtttaggttgtcaggttcagtggcaagagttactgtcagggttactctttgtagaaaatccagtcatagtatttctcatgagcaatggaaacctttcctagaattctctaatcttttatggatcagagacagttttgttttgtttttgttttaatccgggctcatggggctagagcttcggctcagtggttaagagcaccgagttcatttctcagcacccacatcagatggttcacaacttccttttagtccagctccaggggatgacaccctctgctggcctctgagggcacctgtacttacgtgcgtgcactgatgatgaccttggagttctgtcctccaagcactgaaataggccttcatacatgctaggcaagcctgctaccaactgagctgaagactggccaacagttagggttttatttctctcctatcataacaggcctgaaattaacagtgttgggcttgtctaacaggctaggcatgtcatctaaggccaggcttctggcttcctcctctagtatccttagcttgtagtattcaccctcaatgctgcagaatagttgctgtgtctccatcacatttatctcccagtcaagataaatgcaaaaattagaagggattcctgctagcaggcttttgccattttgttttgggaggtatggtcgccccaaagatggctgcctgcatatcattgccaagaaagtaacaacatactagattcaaggctgccaggaggacccagtctgttgctaccctgggcaaattggagttgacttcattaggaataaagagggtttgacactgtgtaagcacctgaggaatattgatgactactggaattttcaaaatatcaaaagcatatttcttttagaaatgagaccagacatgtgtcagaatgtcacatagatcatgaaagaaacagtggaaatgatatgtgtgacacatacctcctgtgtttgactatctccacatcagactgccaaagtagacacagatttcattaatgtctcatctataacctttggagttaccccttctatctaacaacaacagtggccttgagttatatccgtagcatcacacataaatacacaaaaatcatttatactggattttttttttaacaaactaacattgaacttgagagtctgggtcctaagtcaatactacatagtcaaaattagtcatgtccccaaggagcaagaggaccctagggaagtttgtttggtagtaactccaacaatgatctccagacttgtcatctgagaattcctactaggtgtaagtaacatgtttgggtcacaaacttctgccaaatcagatactctggtggtgatgcctctcaagtcttcttcttcttcttcttcttcttcttcttcttcttcttcttcttcttcttcttcttcttcttcttcttcttcttcttcttcttcttctttgatatggagtctcatgtagctcaagctagctgtaaactcactatgttgctaaggatttttttttaattttaaaagatttctttattctattttaagtgtatgagtgttttgcctgtatgtgtatgtatatcatgtgtatgcctggtgccctggaggtcagaagaaggcattagatttcctgcatttggagttatggttatgaactaccatatgggtgctgggaattgaacctgggaccttgcaagagtgacaagtgctcctaaccgtcctaatggctgaggtattgttccagccccaccaatagtgatattgaactccttttcttttttccttctttttttttccccaaatgctgggattacaggtgtgcatcactgccatcagataatgatgggagccacattagaagggtatagtgtcatcccttcactgtacttccaggtcttgggtaatttttgtgtatacatttcggcttcaccaagccttagggaagaataactggtcaagagaagagaaccttgcaatcttagtggagccaggaactgagcctggtgccacacagcctgtgatcgtcaggagacttatgcacgagcatctcaattcaagacttgactaagctacagagtgagtttaaagccagactgggcgaacttagtgagcacctgtatcaaaataaaaagtaaaaagagagctagagataaaactcaatggtagcctgcttgcccagcatttgggaggccctgttttgtctgtagggagcaggagaacagctggcaggttgttcacagtagtgtgtatagcctcatgccagggccacagggtaggggtagccatcgaggtgattcccacgtctctcacctcccagtgtctcctcccaaggtgtacaagtgcgtggtcagaagctgtgcccagatgttccccaagctggacacctttctggagcacatcagaagccaccaggaggagctgagctaccgctgccatctctgtagcaaggacttcccctcattgtatgaccttggagtgcaccagtactcccacagtctcctgccgcagcacagccccaagaaggacagcaccgtctacaagtatgtgtgcatgccacctaccccgctggaccagtgggcagggagcctggcccaggctgctcaggatcagtaacaaattgcaaagggaaactgaggctaaaaactggggtccagcctagagtgtttgagtgttttggcacctgtgggaaaaaatgatactgactcttcttagaccattcttcacttctcaggtatttaccatggaaacagcaccttaaaaagggtaactaggggccagaaagacggctcagtgagtacaggtgcttgctaccaggcctcccggcctgggtgtgattccaaagacccagcatggtggagggaaagaactcacttccatttatttttctctcatctccactggcacacgcacacacaaaatagataaatacaaatgaaaaggaaaacacacacacacacgttagctgggcattgtggcacacgcctttaatcccagtactagggaggcagaagcaggtggatctttgtgagtttggggccaacctggtctatagagtgagtgccaggacaaccctgtctcaaaaagacaaaaaagagggtgggggggatattgagggctagagaagtggttcagtggttaagggtgtttgcagaggacctgggttagttcacaacccccacgtggtggttcacaactgactgcaatagaagagggatctatggtgccctcttctggcctctgtgggctcctgcaagcacaaggtatatataaactcatccaggctcacacacataacacagaaaacaagtttttgtttgtttgtttgttttttgttttgttgttgtttttcaatacagggtttctcagtggctttggaggctgtgctggaactcgctttaggctggcctcaaactcacagagatccgcctgcctctgcctcccaagtgctaggattaaaggcgtgtgccaccagcgcccaaccagaaaacagttttttaaaactagtgttctagggctggagagacggctcagatgtaaaaggctaggctcacaaccaaaaacactggtgttctgtattctcttgtgagaaatgtgattgccacatatatcttcaactttttctccctgaagctgtctcttctgtcatcactcgtctatagagtatctccctgttttctgggcctcctctagattgggtgtgttctgtagatagtcaccatcatgcttctgtcctttgggcttttcttacccatttgctggctgctggttgagagcaggtgttccaaaaacagtcccgagcctatggggacaggtggtgacaggtatctgtctgggacatcttccacatgttgggattgcatttgtacttcatacaagtttatacctgtagggacttgtctgttgacctctgttacttcagaaacttctgggtgaggcttctgggattaagataagtaaatgccaaaatcactgttgcttcagggagacaggtgtgtaaacaaatgctttttgtacactgtaatgaaatgctgccagcctgccctcaaatatagctcaggaggcagctgcttcagggttccctgagggtaaagataaggactgtggagccacctgtcagtgcttgcatcccaagctgacttgggctaattcctgactttggagaaagtattgaactgtcattggcctcagttcccttacctgtggtaagagatcctgatcatgcttagcctgttagaatagggccatccctgtgtcactgccctccccatcaatattttatgtagtcctggctgatttcattgcacagccaaggatgacccttgatttctttgtctccacttctctcaagtactcctatgtagtccaggctggctttgaactcactgtataggtgaggataaccttgaacttctgatctttctgtcattacctcctgagttctgggataacatctgttccaccacacctcacttatgcagtgttggggaccaaaccaagagccttgtggatgttaggcaagcattctaccagttcagttacattcctagacctcactcctcccttgtttgtttccacttagggtctccacaggtaaccttgaattcactatgtagctgaagttggtattgactttgaagtgactctcttgcctcagcgccttgagtgctgagattataggccaatacccctaggcctagctttctcctgaattctttgtaaaggtcaagtaagagcatttaccaaggggctggagaggtggctcagtagttaggagcctgattgctttttcagagatcagagttcaattccaagtacctatatgacagctcacaactgtctataactccaggatccaaaacctacacatagacatacatacaggcaaaaacaccaataaaataaaaaagagaatttaccgagcatatagacatggtccttggaacacaagaggtacccaataagagatgactacagtcctttttgctgtattattcagctgtatgcagaaaccccaaatgacaatgatacaagggcaggtttacctctctcagtaggtagatttagcttgtgtggtggtcacatcatgtttttagaggttggtccatgctttgacagttggttgctgtgtgtccttggagttgagtggacttggcctgcctatggaatgtctccaaccactgaagtgactctgtattcggttttgttttttgttttgttttgtttgtttgtttggttttttgagacagggtttctttgtgcaacatccctggcttcctggaactcagtctgtagaccaggctggcctcaaattcacagagatccgcctgcctctacctcctgagtgctggaattaaaggcgtgcaccacccccacgcagcttgtattcattttttgtttgtttgttttttcttttttcttgttgttgttgttgtttgagtcagggtgttgctacacagccctgactggcctggagcttggtatgtagaccagactgacctcagattcacagcaatcctcctgcttctgctcgacgggtgctggattataggcctatactatcactcctacccccactgccttattttccttttgaaaataagatttattgcctggtgtcacagctcatgtaatcccagcacttgggaggtagaggcaagaattcaaggtctttcttgttcacacagaagtttgaagccagcttaggccctattaggcactgtctcaaaaaaatttttttaaaaaagatttatcgatgttatttgcttcctaattacaaaatgcatttttgttaaatacagagaaaatgattctttttccttaatttgttactgttgtttgcccatggaagccagaagaggtgattgagtcccctgaaactagaggtggttgtgagctgccatgagggtgctgggaatcgaaccctggtcctctgggtgagcaggcagtgctcttaaccaataagccatctcttcaaccctgattttcatttttaaagacgtctggcttcctaggaggataagggacttcaggggtcaggaggaggcagggaagccagagaggctcttacacatttctcagcagctcagcccattgtggagaaaatcagagaagaatggacacgtttgagaatgcatttcatgtaggatttttgtctcctgaggttggatttggggaagtaaggggaaattccatacttgctagagctcatctctctcttccttcccacttaggtgtgtcaagtgtgtcaataaatactccactcctgaggccttggaacaccatgttcagacagccactcacagcttcccctgtccacactgccagaaggtaggtgtcatagcatcttcctcacaggagtccccgagagggacagtgacctgactgaagactttggatagccaggtgtggtggcgcacgcctttagtcccagcacgtgggagatagagacaggcagatagatatctgtgagttggagaccagcctggtctacagagtcagttccaggacagccagagctacatagagaaatgctgtctcaaaatacaaaaaaacaaaaacaacaacaacaaaacagacttggctgatcactcagaggcagaacttgagttgtctaacatggcatcagagaattaagaaggctttgcagagaggcacggacacctgacttgggtcttgagggatgaataggagtttatgagaccaagaaagaacatcctctgtgtaggagaccagcctgggtggcaactcacagggaatgtgctttggctgggctcatgagtgcttacagaactgaggggtctggagggctgggtctgacactttggcctccagccttgtgggcagatgggatgatgtttccaaggagctcgaaaccagagttcctgagctcagaaggtggaaggtggtgagggcaggggtctcggaagctgacctgctgtgattctgtcttactccaggtcttcccctgtgagcgctacctacggcgtcacttacctacccatggcagtggtggccggttcaggtgccagatctgtaagaagttcttccggaaggagcactacctcaagctgcatgcccacatccactcaggtgggcaccctgcccacccctccctctctgtcctgcccttctgtcgcttttccatttatactggctcttctccattgaattcctcttcctgccctccatactgctcctcactcacctgtcctcacctgtgaacatggggctcccaacatcttgaaagcagagaataagatgggtggtggcgatcattataagaattcattgggccaggcagttgtggcgcacacacctttaatcctagcacttgggaggcagaggcaggnnnnnnnnnnnnnnnnnnnnnnnnnnnnnnnnnnnnnnnnnnnnnnnnnnnnnnnnnnnnnnnnnnnnnnnnnnnnnnnnnnnnnnnnnnnnnnnnnnnnnnnnnnnnnnnnnnnnnnnnnnnnnnnnnnnnnnnnnnnnnnnnnnnnnnnnnnnnnnnnnnnnnnnnnnagcctgttgtacaagagctagtcccaggacagcttccaaagcctcagagaaaccctgtctcgaaaaaccaaaaaaatttttaaaaaaagaaaagaaagaaagaaaaagaattcattgggcagggcagggcagtggtgttgcacacctttaatctgagtacttgggagacagaggcaggtgtatctgtgagtaggaggccagcctggtctgtacagagtgagttccaggacagccagtgctacatagagaaaccctgtctcaaaaaagcaaaaataaaacaaacaagggagggaggggaaggggggataaggagaaaggaaggaaaggaaggaaggaaggaaggaaggaagaaagaaagaaagaaagaaagaaagaaagaaagaaagaaagaaagaaagaaagaaagaaaagagggaaaaagaaaagaaagtagaggtgagccccagaggcaggtaagggggacttgactccgctctctgggtgccagccctgctagactgggtgttggatgactgtcctgcaaattcctaccccctctcatagcttcccagcttgaggtgtagtaaaagtttttggattgttaaagttttatggaggagaaagagagatggtatctcacatagccaaggctgatcttgcactccagaccctcctacctctatctcctgtgtgctgggattacaggtctgtgctgcaggattcaggtgtgtgtgtgtgtgtgtgtgtgtgtgtgtgtgtgtgtgtgggggggtgtgggggggggggggagagagagcgcgnnnnnnnnnnnnnnnnnnncaggtgtgtgtgtgtgtgtgtgtgtgtgtgtgtgtgtgtgtgtgtgtgtgtgtgtgtgtgtgtgatgggtatgcacatggcatacatgtgtggccaaatggcagccttgggtgttagctcttactttcagccttgcttgaggcagggtctctgttgttcactgctctgtacacagatgagctttggcctttaagtgcccagggattgtcctgtctccacctctcatcaccctttagcagtgtaggattacagatgtgagttctgggaatttggactcaggtactcacactttgcagcaagcattttacccaccgagccatttccccattccaaggattcggtttttatctttaaaataagtattagatgggtgtggtgtacacctgaaatcctgactactcaggaggctgagatgggagggccccagggtttgagataagcctgggctatagtttctgtttcaacacaataccagacaaaaacaaaatccttacaagctagaacctgcaggtcacagcttacacggtgctcccaactccctccatagtaactgtggttactgcctagtttgggtgacagattagaaaagaatcatttatgtgtttgtgggagcttatgtcatgtgcatgaagtaccctcagagacctgaagagggtggtatagaaaactgtgaactgcccttctgaaagagctgctgcaagctctcttaactgctgagtcaagtctccagaccctctggttttatattttgtctgttcgacacactttcttactttcacctaagtgagcacatggtgtaactatattatctgcttatttccttccttttccatagctgcttagtattgatctgttccctccctatgagtgaactttcctgtcatcatcatcatcatcatcattgtgctgggaattgaacctcgggcctcatctaggccagataagccctattactgggctatacccttccccctagatccttcaatgagtttttcagccattattattattattttaagttaggtaacatttcagggtatagtcactcacctttaatctcagcactcaggaggcagaagcaggctgatctctgagtttgaggacagcctggtccacagagagagagagttccaggaccaaaaaaaagggggggggaagaaaacttgtttcttttggtactgaggtcttttttttttaatacatttttaattaaaatagaattacatgacagtcttcccttccctccctccagctcttcccagattagttttatggtatagatagttcagtgtgtttttttttctgacaagctttcagaagttggtttgtgtggcttgttcttaacagtgtgttggtttaaaacatgtatttaaagcataatttccttttgggatgatgaagattctgaaaggcaaggcatggtagtacacacctgtaatccaggccagcctggtctacatagagaggcactgttggaacacactctgctacctttggctgtcacattcaggcccatacacacacacacgcacacgcacacgcacatgcacacaccagcaacacaataatgacgagcctctggcttccctgcaatgttattattttttggcctagaaaggcaggtggctataccaagctgctgccccagcatgtccagagatctttctagagcaggaaacaaaatgacttcagaacttttttgtttatatgaggcagggtcttgttctgtctctcagactggcctggaagtatgagtcaatattcaggcaacatatcaataccttgtctcctagaaaacaagccaggcggtggtgaagcacacatttaatcccagtaacctggaggcagaggcaagcagatctctgagttcaagaccagcctggtctacagagtgagttccaggacagccagggccacacagagaaaccctgtctcaagggagaaaaaggaagctgtgggtaggggttgggtggagagatggcttaacagctaagaacactgctgtcctttcagaggacccaggttcaattcccaggacccaaagtttggctctcaactgtctataaccgctgttccaggggatctgacaccctcttctggcctccttgggcatcaggatcgcacatgtacatggtgtacagacttaacatgcaggcaaatgatgtcatacacataaaaataattatatatatgtaatttaaaaatatattgtaaaactggggttatggtgtggtggtgtgttgctttcctggcaagcaccaagccttgtgttccatggtgacacattcctgtaatcttagcacttgggaaggatgaggcaggaggattgaatactccaatccagcttgggctacacagggaaaacctgtccaaaaaaaaaaaaaaaaaataccctccaaattctctgtgccaagtcaggagaaataagaaaagctcctcctggaggattcagacttgtcctcatgggattcatgaggtgttcccatgtccccacaggtgagaagccctacaaatgttcagtgtgcgagtctgcattcaaccgcaaggacaagctgaagagacatatgctgatccacgaacccttcaagaagtacaaatgtcccttctcgtaaggaggggctgccctatttatggggaggggagttggattaccccaggggggtctatgtggaaggttagactgagggcctctctccttgggccctaccggaccctgcctggctcattccccccactactcctttgcccatcccttggcttagaaaagctggtgcaggccccagtgagagggttcatgctcctgttctgtaactgatggctttgggttccaggatgcacacaggctgcagtaaggagttcaaccggcaggacaagctgaaagcccacattctctcccacgctggtaagaggcttaggacccattggagggcctggctaagacaagttccccgagaacagctattgggaggaagagcagcacttgcatgaggcatattgtccaggcctggtctatccagccagtgggtttctgcacatgtgttcatgggagctagaagccaggtctgtgttggggtccttggcacagcagaggcaaattccatgcaactccagtcccaggggaagtagatgtaagcagctgaactagattgtgtgcagtaacacagaggtgtgtgtcagtgccatccaagatgtgtccaagggatggcctggaaaggcagaagggacagaggtctctaagccaccttcccagggcaaacaagagtgtttatcagcaccccatccactatccatgccaaccccatccactgtccatgccaaccccatccactgtccatgccaaccccatccactacccatgccaaccccacccactgtccatgccaaccccatccactatccatgtcaaccccatccactgtccatgccaacccccatccattttcatgagcaccccacatccatgctatttcagtgtggcatctcccccttagtgtaacaatcaaaaatgtcccctacaattcacctggagataaagttgcttctgttaaaagcttgaaaatgggagggaagactggcctagcatgcataaagccctgtggtttgagtcccaagtaaacataaactaagcatggtagcaaaaaaataaacaaaaaacctgaacttccagtacttgggggccagagaaagagttcaagctcatccttggcttcatagcaagttcaaagccagcctgagctatatgagatgcccctctcctttttaatgggaaatgggggagggtccatcagggaatctgacatcttggctctgagccttagtgctaccagcttcttgctgggtggtctcagggaagtagctgctcattttggcccccaaccccaggaggctgaagagtgaaggcatttacaaaaggggcctggcccagcagggctggtgtgagaatcaggaaagtcctccacagagctcaggcctgaggagagagaagagcgagaaaagagagaacaagaggaggccccatggataaggaaggaccagaggaaggaggggccagagcacagggtggaggaggggctgggcagaccacaccctgatttgtaggaaacacctcagagcagaatttgggcaccagggctcttactagtttgtgctttacaaaaacatctctctctgccattggcaatggcctgaggggcacaggtgaggccagcagcccagaggagttggctgcatgtggtcatccagggagaggttgtatgacctacagagtccaccaaggcttaagaattaagcagattaggggctggagatatggctcagaggttaagagcaccgactgctcttccaagggtcctgagttcgattcccagaaaccacatggtggctcacaatcatccgtaatgagatctggtgccctctgctgctggtgtgcagatatacatggaagcagaatgttgtatacataatannnnnnnnnnnnnnnnnnnnnnnnnnnnnnnnnnnaattaagcagattatttcaggcatgggacaagcaactgcaaaggcccaggggctggaggaggcacagtgtggtagagtgagtgacccggaaagtgaacgacgataatggagccagctgaggcctgaccacacagatgcctgtcagaacagaggctgggtgggacaggcgcggggggaggggatgtgcctctccctgacagcctctcactccccaggcctgaagctccacaagtgtgggctgtgcagcaagtccttcagccgccgggcccacctggctgagcaccagcgtgcacatacgggcaactacaagttccgctgcgcgggctgcgccaagggcttctcacgacacaaatacctcaaggatcaccgctgccgcctgggccccacgaaggacaaggacttgcaagcccggagaccttcccggaggagagcagccccacgtggtggaggcagcatcgttggagtgcacaaggaggagagcccggtgcccgacccactggggctggaggagctgaaggccgcagggcctgcacccgaggctgctcctggcaagccacccttcgagcaagacgccgtgctgtccattgtggtgggtggggacccggagctggtggtgcccgggcacaccgagggtctgggctccaacctggcactggccgagctgcaggctggggctgagggagcgtgtgccatgcttgctgtcccggtctacatccaggcctcagaatgaccaggctggattttccgggggagccactggcacaagcccttttggaaattactgtatcaacccaatcccatgtcctcctatgccctgtgatcagctggggagccctgcagcactcacagggtctgaggcatgcaccgtagctccaggacatagcagtgctaagagagatggccagaaaatgaggtgcccagagactggctgatggaggcttgtacttgggcctcctctaaaagaaggccgggtggttctacctgggtggcctcagactgtgctactcattatactggcggggcgtggtcaagtcctagtgtgtggaaccattaccagaacacttcctgatggcgtcctcaaaggactgtggggtgagtatgtaagaggcactcagcctgggcttagagtgtagctgccagccagacctggcttcagatttaccagtgtgacctcgagcaaggcacttcacctctttctgctccatgttcctcacctgttcaacaggacttaatatagtactacctcttagagtgtcctgaggacaaagtatgttgaaattcgcaaagggccgcgcacagtacccatggcttggaaagtgctcaataaatctcaataaatgtttttatcaatgatgtgtgtccaaacagctcaggcctgggccttagtgttctcttgcttagcctgaagggacaacactcccctctaaaccacaggctgagatgccctgtagtcctcacaccacggccagccaaggagaatcacagaggtgcaggctcgcccagacagccggtaactctaacagtctgcagcactcaagaagctgaggcaggattttgagcttcaggtcagcctgggctacaggctaccaaccccctctcttccacaagtgcagacctggggctccccagatgctatttacacatagtctgtgcaaatggcccctgggagagtttatacttgtgtgtggaacttaagaatcctgggccttccacccctccccatgctatcaattcagaagctctgtcgacagaagcccctcccttcccagctggtccaggtgggaggcaagccaggccatgtgagaggcaggtatgagaaagggcccttaactcatgttttccatctcttcacagccgtcctctctgtcacgttgcttctgttacagaaagggaaactgaggctcagaaaaggaccagggcaggacacagtagagttgactgtttgatggctgagtttcctagaagcctgtcacgatcttcagacctctgtgtggagacccaaggctggagctgagagccatgcctgacttcccacatgttcgaggaggatgtggtggtggctgtgtgtgtgtggggggggggtgctgtaggaaggacgaagacaatgaggataggtgagggtccaagtgtcctgtctgcaaaagagatagaggactcatggggacggggagttttggaagagatgacatttgagctggggctttgttttggttcacttgattggctggctggttgactagcaggctgattttctgacaaggcctcactctgtagctcaggctatcctgaactcaatatatagtcacgcctggctccaaactcctgaaagccatcttgtctcagcctcccaagtgctggggttacagatgtgggccaccacacctgctgccacagagtgctctggtgggaagaccagagaaggcaattaaggaagcaggtatgaagtctgggctggtgaaccgcccaggtgactagagattgggaggaatacctgaaaggtgacggttgctgattctttaagccttcatgtaatggccactgctaagcaattcatgtcacattgcctcagtcatcaggtgtgcgctattgctttcccatgcccaagctcacacagcctacaagttgcacagctgggagtcaagccagcatggcccacctccacatgctcctagcctctctgctctattgaaatatgagttggtgatgaattagagagaacatagggtattaagaaaattggcttttattctctacatatcagaggaatcttgggagaagtcctgtttgagattggagcatgaacattcagggaaatgttaaaacatctgcttctacactcagctgttcccaacagcactcacatgtacacatattttccagaaatcatgaaaaatcactcacttgtcataggcttatcatggtttcaaattagggactgaattcagtttggaagctgagataaggcaatgggggtatcaagggttatcaggccaaagctgcagagcaggtaagtggcagagacagatcacagaataaggcagatttggcataggactgtgtgtctagagaagcctgacactcttatagtctgaatggcacatgttagcaggtgggagactgagccccagagaaaagaaagctcttcatcatgggccacagagaatcaatggcagagggcccaaagcaccttgaatagcccccaagttgcagaacaatgtagcattgagaggctgaacatccagagagaacacagattggtgtcaggcagggctgtgtttgaatcctggctctgccccttctgtggtgaatgtttctgaatctcacctttctcagctaatagaatagtatctgtcttagttagggtttctattgctgggaagagacaccatgaccaccgcaactcttgtaaaggaaaatcatttaattgggggtggcttacagtttcagagggttagtccattatcaccatggtgagacatggcagcgtgcaggtagacatggtgcttgagagttctatgtcttgaccagcagacagcagaagcaactgtgacactgggtgtaacttgaacatatgaaacctcaaaagccgccttcacaatgacacatttcctccaaggtcacatctaatagtgtcactccctaggggccaagcatccaatcatgagtctaatgggaggcatttcctgtccaaaccatcacagtatcctacctgatgaggttgatgctgtgttttggggggagggagggtaaaataggtaaactggagagcacagactggcaactgctgggttgaattcagttaatataaagaaaggtgttcatcatgtgagaaaaagagaaaaagagctgacattctcaaataatgatactgagactgaaggtatagttgtgtggtagagcatggtcccgttttcaatcctcaccactgccaaagaaggtgaataaatggataaataccagaagggtggtggtacacagctataatactagcactctggaggctgaggcaggaagatcacgagttcaaggccaaacttggcctctgagtaagttcaaatcctggctgagctgccatagcaagactgtgtttcaaacaggcttgatgtgaatactttgtatgtgtgtctgtgcgtgtctgtgtgtgtgtgtgtgtgtgtgtgtgtgtgtgtgtgtgtgtgtgcgtgggtgttgggtgtattcgggtgtgtgtgtgtgcattcatgtgtgcatgtgtgttgtgtgtatgtgtgtgtgtgcgcgcacatgtctgtgtgtgtgggcttgtgtgtctgtctgtgtgtgtgcattagtgtgtgtgtgtgcattagtgtgtgtgtgtgtgtgtgtgcattcgtgtgtgcatgggtgtgtgcatgggtgttgagtgtatgcggatgtgtgtgtgtgcattcatgtgtgcatgtgtgcacggtgtgtgtgtgtgcatgtgtgtgcatgtgtgtctgtgtgtgtctctttgtatgtgtgcattcatgtgtgcaattgtgtgtgcatgggtgtgtgtctgtgtgtgtatgtcttgtatgtctgtgtgtgtgtctgcatttgtgtgtgtgtgtttgtgtgtgtgtgtctgtgtgtgtttgagactgggtttctctgtgtagacgtggctgtcctaaaactcattatgtagactaggctggccttgaactcagatctgcctgcttctgcctcccaagtgcagggatgaaaggcatgggccaccactaatgctttagtcccagtacttggtaggcagaggcaggcaaatctcagagttcaaggccagccaggtctatatatcaaggccctgtttcaaaaaatattactaatagcctggtgtggcacatgcctttaattttagcatttgaaaggcataggcaagtgaatctttgtgagtttgaggccagcctgctctacatagtaagttctagtccagaaagagctatactgtcagaccctgtctcagagcaggggagggggaggaagaaaaaaaagctggaatgttttcacagcatttgtgaagctcggggttcagtccccaatacttcataaaaccaggtggtggtgcacacgtgggaaataaaggcaggagaattagaagcttgcggtcattactaggtatatagcaaattggaggccagcctgcgatacatgaaacgaatctcaaatatgtaataaataagtcataatagtgaagttggaatgaactacaaataaaacaacaaatatggcaaaaatgtactacagtgggaaaacatatggtaggtttcttttatgccaggattcatattaaacattcaagcatgacagtaggggtctggccagagcaataaaacaagaaaaggaaatgccataaggggctcatggaatgactcagggtaaaggcccctgccaccagttcctgacttccacacatgcacagtggcacacccacacacatacactcatgcttaaataaatgttaaaaaaaaaacagagaacagaacactacaaggtttaggcagggtaacgtaatagtgagatagatatatacaaatttccggatcttcagtagcaattaaaaaccatgccctggatttatgccatgcagcagctttgaatgcttgggacagagttggagaagtaggaaaggaaattgagtcatttactaaagttatacagggtccaagggaaaccttcatgcagttcttacaaagattgacttagcagtaaatagaatgataccaaattcagaagctagacaagtaataattgaatctctggcttttgaaaatgctaatgcgcaatgaaaaaaggtaattaggcaattaaaggcaagatcagcacccttggaggactgggtgtgagatacaatcaatactgaacctcataaccatgatgatgcttggataggagaggtgatttccagggggttgaagaaaaataaaaatgtcaagtgtttcaattgtggcaaacaaggtcacctaaaaagggactgtaaacagggcattcctagaacaatgttttttctaagcataattcaatagaatgcccctcccttctggattaggcagaaagtgtggcaacggcaggcattgaactaatgaatgtagatcaacaaggaacagtcaaggtaaccctttgccattgggaaatgccttaggggactcttgaaggcccccatgccaaattcagtttggttgtctcttgtaatcatggaagaaactccttgccagagaaattaaagaacctaatgcctattgtaagaaaccatactgttctggatgatagaaaatctatagaagagagaacaaaaaatcaggagtaattgtaaagcaaatattttggcaaacttctataaataaagaccaaaattaaaaatatgaataaatgatattgtcattgaaggctttatagacacaggtatgcatgttataataattgcaccagaatcttggcatccaaattggcctcataaatgttcatcttttagggattgaaactttatctcaggtaaaacagagagtgaagtgggttgaatatataaggccagaaggacagagaggaaaataaaagccacatgtggctaacatagcaatgaacttatagggacatgatttgttatagcaatgaaatattcagattaacattcctccaatcttagaaacaaaccataaattaacatatgtttctggggaaaatattagaaggtattataaagaacagtcaccaaccattcaggttgtaaaaaaacagggaacaacagctgctgatctttcaaaggcaccaacaaccgtacctttaaaatggttgatggacaaacatgtataggttgagcatgacttttaacaacagagaaactgcagtccttagaacagctggtacagaaacagctaaatgctcttcatattgaagaatcaaccagcccttgaaattctcctatatttgttattaaaaagaaatctggaaaatggagaatggtaacagatctaagagctgttaataaggtgattcagccaaatggcttcctatggtctggaattcctctgccttctttattacttaaaggatggcctcttataattattgatttaaaagattgtttcttcactatacctttacaagaaaaagtcagcgaaaaatttgccttcacagtgcctacttaaaataattcttagtctattaagagatatcaatggaaggttctcccacagggaatattaaatagctccacactgtgccaatattttgtatgacagctgttggaaatgatacgtaaggaatttcctcaatctatagctcaccattatatagacgatattttactagctgattcaaatgtagatactatagagaaaatctttgaagaagaaaagtttgccttgttggagaatacaaattgctcatgaaaaaatacaaagaggagagtctactaattatttaggacataaaataagtctacaaaaaattagaccccaaaaggtgcaagttaggagaaatacatttcagactcttaatgactttcaaagattgtaggaaacatttcctatctatggcccactattgggatacaaaatgataaactgagtaatttgttcaaaccttagatggtgacaaggacttaaatagtccaagagaattattatagctgaagctgagagagaattgactttgatggaaaagaacttacaggatgcacatgtggatcatttggatccaaaacttgattgcattttggttattttaccttctaagaattcttctacaggaatattaatgcagaaagaagatattatcttcaaatggatctttttactacataaacagactaaaaatttaaaaacttatgtggtaatgtctctgagttgattctaaaaagaaaattaagacttcatcaagtattaggaatatatccagcagaaattatagtaccctttactaatgatgaaaatcacaaattatgggcagacagtgaaatttggcaaagagcttgcagtaatttgggggagaaattaacaaaaaatatcccaaaatcaagagaattcgatttataaagggaactaactggatccttccttgcattgtatggggaatacaaatatctgaagcccctacattctatactgatacaaaaaaaattggaaagtcaggatacaaataagaaaatttaacttaagtggctcaacacccttaatagtctgcccaaaaatcagaatttatgctattcttatggtgttaatggatcataaagaacctattaacatagttactgactctctcagtatgctgaaagagttgttttacacactgaaaccactgcatttattcctgatgaatcagaattaactttgttatttattcagttacaagaaataatcaggaataggaaacaccctttatataacacacatccaaagccatatgggtctgtgagaccctctagcataaggtagtgaaaaaactgatcaactattgatagtaaatgtgctaaaggcctcagaatttcataaaaaaaaatcatgtcaatagcaaaaagttctccattacttggcaacaagccaaggaaattataaggaaatgtcctacttgttctttatacaactccaccacctgcaggaagtaacccaaaaggtaatcaaaggaatgaatgtgttttatggatgtgtttcattttgtagaatttgaaaaattaaaatatgtacagcacaccattgatgcctattcagtatttcaatgggcaactgctttgagtttggaaaaggctgattctgtaatcacacatttgttagaagttatagccattatagctatacttgtaaaaattaagcagacagtggctgtagagatggctcagaggttaagagcaccgactgctcttccagaggttctgagttcgattcccagcaactacatggtggctcacaaccatccgttatgagatctggtgccctcttctggtgtgcagatatatatggaagtagaatgtcgtatacataataaataaataaaatcttaaaaaaattaagcagacaatactccagtatatgactctagtaaaatgaaaggtttttgcttattacaatataaagcatattacaggtataccacacaatcctacaggacaagcagttatagaaagatcagatcaaactctaaaggatatgctaaattaacagaaaggaataaaaatgaccccccagaaatagagtgcataatgctctttttaaaaaaataatttatttatcctcagttttatgaacattggcattttgcctgcatgtatgtctatgtgagggtgtcagatcttggagttatagacagttgttagctgccatgtgggtgctgggaattgaacccaggtcctttggtaggacagttagtgctcttttaagatttatttatttatcatgtatagttttctgcctacatgtatgcctgcaggccagaagagggcaccagatctcattacagatggttgtgagccaccatgtggttgctgggaattgaactcaggacctctggaagagcagacagtgctcttaacctctgagccatcttcccagcccagacagttttggtttttttttttgggggggtagggttcgagacagggtttctctgtggctttggaggctgtcctggaacttgctcttgtagaccagtctggtgttgaactcactgagatctgcctgcctttacctcccgagtgctgggattaaaggtgtgcgccaccaccaccaccaccaccaccaccaccaccacccggctcagttagtgctcttaaccactgagccatctctccagcccacacaatgttttattagctttaaatttcctaaatgctaatgaaaaaggaatgaaagttgtggagagacattggataatagaaaaaactatggaattaaatcagcaggtatacttcaaagatctgttggcctcagaatggaaaccaggacatgtgttacgttggggaaggggttttgcttttgtttccacagaagaagaaaagctatggataccatcaaaactgataaagactcttttgaacaggagaggcatattaattagaagagatcatagttcatcaaacatcatggctgttcaatctaaactaacctataaaactaacaaatgcttttcatttgatcagatataacttgccaaaagagagcttccccaaaattagggttggggaagggttctgtttctgtttttttcaggagaataaagggatccagctaaagaatccaaagaccactgcacaaatgagacatctgaagaaaaaggacaaatcaactagaaaaattgtcccaagaaaaggagcaaattgcctattggtatatcacgtttccaacaggataaaatttcataaatcttcccaaatgtttgtttctgctgttctctacagacatataatgcaaatggtctttttgtagtcctagtccaattaaaaattaaagctggttttggagttggagtgtggctctctccttctctagacccaagcattcttgttaaagtaaaatccaaaatctctgtgtcatgtcagaaaagccacctgatttgagacagaagaaaaaccaaaattaaggggctattctattgccactaatctcataatactttggttttattttgactttttaaagcttttctttttttttttttttaagacagggtttctctgtattggaccctgtcctggaacttaccctgtagaccaggctggcctcccggagtgcgccaccactgccaccaccacccagcttaaagcttttcttaatgtctaaatattacctcaaaatgtataagaataatatatatgcatatatatttaaacttctgtcatgatattaacggtcatatagagtactaactaattttagaaagaggcttcatctaccttcctgtaaataatttcaggtttgaggctctgtcagttttctgcagtgaacaataaccatgcctaacactgacctttgaagtctccaaaaggaagatggggccctacaataatgattccaccaggattatgataactccactaagctgaaaaacacctcctaaagatcagctttggattacaaactgctcagaacaatttcgaggtggctagctgagatgatccagtctcacagacgactccagccaggacttgagacaaaccctacactttcccattacacagagactggacaaatcatacagctatctctcccaggacttgacaattaacctgatttttttcttttcaggatcccctagagttgtcgtcaccccccagacagcaggaaataaatttaagaacatgacacttacattcccaagaaatggtgttggtggttttggtcatttaattggttatgagtatttgtcattgtttagggtacttggttacaagtttttattgataatggtcaggaaaaagctaaataggagaaattagattcagagtcttgttttgaaaagaaaaatgggggagggggtactgggctggagagatggctcagaggttaagagcactgtctgctcttccagaggtcctgagttcaattcccagcaaccacatggtggctcacaatcatctgtaatgagatctggtgccctcttctggcctgcagggacacatgctttcctatttgtattttctccaaagccagtgggaggtaacgacctgtgtaagcaaacagtgtaactaataaataaatcttgaaagaaagaaagaaggaaagaaagaaactggggggtacagatatgataggataaaaagggcagatttcaactctgaaaagaaaaaaggaagggccgggcgttggtggctcacgcctttaatcacagaactcaggaggcagaggcaggcgaatctctgtgagtttgaggccatcctggtctacagagcgagttccaggacaacctccaaagcaatagagagaaacgaggaaaaaaaaagaaaaaaggaaggatataaggatataggtatgataagataaaaaggtaggttattgaatctacttttaaaaagcaactaatagttttaaatattttacattggattgtacttttgtatattttaaacaaattttgtatattgaggggctggagagatggctcagtggttaagagcactgactgttcttccagaggtcctgagttcaattcctggcaaccacatggtgactcacaaccaccttaaatgagatctggtgccctctgctgacatgcaggcagaagactgtatacataataaataaataaaatctttaaaaaatttgcatattgatgcaaatttgagaataattttgttagaacatactgtacatagatactgtacatagatttctaatattgttcaaggtattatacctttacagctcatttaataatgtaatgcaagttcctaggtttttttgagggggaggggcggggatggggggtggaggagtgtttcgaggcagggtttgtctgtggttttggaggctatcccagaactatgtcttgtacaccaggctggtctcgaactcacagagatcctcctgcctctgcctcccgagtgctgggattaaagtgtgcaccaccactgcctggcctaaaattttagtttttgaaaggtattattaccaactatttaggataataagtaatgcagattagtaattagtcaccttttacaattatagtcacattaggtatgttttcaaggtcaaaagagagatagtttagatggacaagtcatcttcaaacacttcagagatctacagaatatggcatttaagatgttttaatgacataggttctttttttgttttttaagacaatgagacatgtctgcttctggcagcaccaatctaaatcagagaagatgatggacatcaaagaaacttcacatggagtttactttctttgtggcaaaaattagccactgggcattaaagtgctcttgccttgactactgacagtatgctgtccagattggacaaacaggactcaaaagacagcgactgctaaaacaaggcagggcagtccttcagaatgtcgtgcttcacagaaaagtctgttgaatattctaggcctgtaggtggaagacggatgcccagcattgcagaggaaccctgggtgactttccaggcagccagctgtttctcccatttctcacactttttggaagtcacttgcttgcactttctgcttactcagttaatgttatgtacttcctggatctctgagggagttgaagactagatagttatagctttccttgtttaccagactcagaaaagaaactcattaaagaggtgtaatgtgtaaaatgttgagagacatagaaatataattttgagttggtaatgcaagttagaatagaaagtgaattaggtacaacacttttggactcaccaagatagatatggagtattttctctgaatttgacaaatgcaaatgaactagacattgttgatgtatttattgcctgtatatattgtatatagttattatacatgtatagtttttcttatattagttatgtttctttttattttagacaaaaggggaaatgtggtgatattttgtttatgatctaacaaataaagcttgcctgaagaccagagtgcaaagctagccacactagaatctgtgctccttccactgtctgggatccagggatggattgtaggacgacaggcttagcatcgagcacttttattcactgagcaatcttgatagacccaagtttctgtatatttcaattcatttctttcctttcctcttttctttccccctctcctttttccctccccatcccttctcctgcctggaacacctggaactcacagagttgcttaggtccatttgaactgtcagcaatgctgctgacttggtttcccggagggtaagattattgattatgagctgccataccctgataacctcagtttcttcttttttcttttttgggttttcaagacagggtttctctgtgtagcagttctgactgtcttagaactcactttgtagaccaggttgtcctggaactcactgagatccacctgcctctgcctcccaagtgatgggattaaaggcatgtgccaccatgcctggctaatattgtctttttatttatataaataaaattatttagttttatttatgtgtttgtgtgtgtgccatacaagtgttggtgctcttggaggtcagaagcaggactcagaccccctggaactgagttaatggtgattgtgagccacttgatgtgagttctgggagctgaactcatatcctctagaagagcagaattcactcttaatggctgagccgtctctccagctccacacccagcttcttatataggtgctaagatccgaactcaggtccttgtgatggcattaaatcagcagaaccatctcttcctccttttgtttatttgagaaagtgtctcctagatgtctgagatgtagcacaggctatccttgaacttgctatgtagcttcagataacgttgaacctactgcctccactttccaagggctgtgccaccactgtacctgacattcctttatggtttgttgtcctccttgaaacaaaagctctatgaaagctaatggcttaatggtttctcagttgggctgagaaactggggaggaaagttggcttgcctgtgggctatcagtagaacctcccccgctccccctaccacccccccagaaatcttttgactgatataccaacctctgttagtatttacctcattgagagtacagaggaactgatattaatcccaccaatcaagaataagatcactgccaggtggtcttggcacacccctttaaacccagctctcgggaggcagaggcaggtggatctctgtgagttcaaggccagcctggtctacaaagctacacagaaaagccctgtcttggcaaattaaaaaagaaaaggaagaagaagaggaggaggaggagcagaaggaggagaaggaggaagaggaggaggaagaggaggagggggaaggaggagggaggagaaggaggaagaggaggagggggaggaggggggagaaggaggaggaggaggagaaggaggagaagaagaaggaaaacccataattcattgtatttcccatcaggttcaatcaagggcatgcatatgtcctgttgtacttccagcctatatccaatcagaggcaagcatacatcctgacctggctaatattgtctttttatttatataaataaaattatttagttttatttatgtgtttgtgtgtgtgccatacaagtgttggtgctcttggaggtcagaagcaggactcagaccccctggaactgagttaatggtgattgtgagccacttgatgtgagttctgggagctgaactcatatcctctagaagagcagaattcactcttaatggctgagccgtctctccagctccacacccagcttcttatataggtgctaagatccgaactcaggtccttgtgatggcattaaatcagcagaaccatctcttcctccttttgtttatttgagaaagtgtctcctagatgtctgagatgtagcacaggctatccttgaacttgctatgtagcttcagataacgttgaacctactgcctccactttccaagggctgtgccaccactgtacctgacattcctttatggtttgttgtcctccttgaaacaaaagctctatgaaagctaatggcttaatggtttctcagttgggctgagaaactggggaggaaagttggcttgcctgtgggctatcagtagaacctcccccgctccccctaccacccccccagaaatcttttgactgatataccaacctctgttagtatttacctcattgagagtacagaggaactgatattaatcccaccaatcaagaataagatcactgccaggtggtcttggcacacccctttaaacccagctctcgggaggcagaggcaggtggatctctgtgaggtcaagggcagcctggtctacaaagctacacagaaaagccctgtcttggcaaattaaaaaagaaaaggaagaagaagaggaggaggaggagcagaaggaggagaaggaggaagaggaggaggaagaggaggagggggaaggaggagggaggagaaggaggaagaggaggagggggaggaggggggagaaggaggaggaggaggagaaggaggagaagaagaaggaaaacccataattcattgtatttcccatcaggttcaatcaagggcatgcatatgtcctgttgtacttccagcctatatccaatcagaggcaagcatacatcctgacatatttcctgcctgtgaacctcctgaccacatgcaatcaaatacatctgctatagatgggccaaacaaaattgtttaggaaagtgaaaatatgtgacttgttatctctcataaacaatggcccccagcatttcaggagctatctgtctttaggcaaggaaggggcttgtagatcagcggcgttttgtttcatggatctcttagacatggtaattaaaacttaaaacataactttggctctcacactgacctacaaatgttatcttccattcccaaagtccccctttccacctaataaactccctaagcctccactactgcaggaacaattctgtgtagaggtgtgtaaagagtctttctctgtcccaccattcagctcccaaataatgacatggagatttgtttatacatatatacatttgtttatacatacatacatactcacagagatccggctgcctctgcctctggagtgccaggattaaaggtgtgcgcccccaatgcctggctagacttgttaataattaaagcttgaccttagtttaggcttgttccactaactcttataattttaattaacccctttatattaatccatattttgcctcatggctttttacctttctttcattctctacgcacaacttcctccatgtctctttggcacttggattcatctcctacttcctctttctgcctagaagccccacctatacctcctgcctggctattggccattcaactctttgttacaccaatcacagcaatacaccttcacacagtgtacaaatatcccacaacagaggttagtctctgatttccacatcgcctccatcaatcccattctaacaaaggcaaagacatccacttatagacctatctactatgcctaaaactgcccaggaattcttcagttaacatctgtgaaataaacaacacactttaaaagaccacgacgcaggttgcctgtcctctcctctcaccacagggcagctgagtaactttcctcaggtagattctgctatgtgggcttagccatgtgtgagagaggacagtccactggtctgaaggtagggcagaaacaatctgggaaaatgactgaagcaatagcttgcaagtctcagttgactgagcaggtccctgtggcctaggaaaacaggttggaccagttttgccccaccccgcagggaagaaggaatggaggcttcaaacacaggtgctcccaacccccatagcttcaaaccctttgtccaggttctcaggtcctgcacaatttgaatcacagaggttgacagagtctgcactcatggttaagggtttgacattctataggggtatttggggtacatttaagagccctagcccgggtgaccaaagaccaaagtccttgccctttgtacagtcatagagaatgcactctttgggaggaaagatcactttccaaggtctcacttggggcaagactcccagatcatccctacctctgtcctttcattaatccatttaaccaatactttcctagcttagaagataacatcacgaacacaatgatttgtatgatcctttgtggagattaaaaaaaaagaacacagtaaatacaacaattatgtggtttgttgtaaagcagaaaagaatagaaaggggagtgtgtggagtgaagtgcctggaggaagaggccagggggaagggaggctcatccctccccgctcccctttctgtgtgtgtgtgtgtgtgtgtgtgtgtgtggtgtgtgtgtgtgtgtgtgtgtacaggtctttacctacttcgccatccctccccgcccctttctctctctctctctctctctctctctctctctctctctctctcggtgtgtgtgggtgtgtgtgtgtgtgtgtgtgtgtatacacaggtctttacctatgtggccatccctccagccctttctggattcttgtgtctgcatttcttgacttagcctttcttcactttcaaagccaggaggagcatcttgcattctgatcctcctcctttgattacaccatgtccaactggataatccagaatatcctcttcctctcaaagacctttaaggacattctgggtatagggcataggtatctttggaaagttactgtgtggcacacttcagggagctactgccaaaatccaagcatgagatagataatagtgacctggagggaagtgacagcagtgaagagtgacagatgctggggctctggggacactttgagggtcgagccagcaggatgttctaaggcattggacatgtgttaattccacaaattgacaagacaactacaacttaaagccaaattttgaagcaagctttaattaaatactggcccggtggttgggctctggccaggtccatacctaggttcctgggaaatggccccatgtcactgtttgcagtggcttaaaccccataattcatcacatttcccatcaggtccaatcaagggcaagcatgtgtttcctcctacccaaaggggatcaagcacatctggtgcagatgggtcaaacaaacatatgaaaaacatgtggcttcttatctcccataaacaatatttcaggaactatttgtccttgagcaagaggcttgcagatcatttttgtttcatggatctcttaggcatagtattaaaacttaaaatgtaactttagctctcccacatggactttccttccatctatctggacttggaagcagaccctcccttctgtgagagagagtaggcgcctctataaaggtccagggagtgatcactggagcctgtgtgccccctccaatgtgttgttactgttagcattcaggcatctgtactggcttgtccttggggttctgacagaatatgtcctcagctgcagccactaagagcacattcactatgttcccttttaaaagggccccaactcccatctctccctccctctctccctccctccctctctgcctgtctctccttctctcttctctctctgcctctcctcttctgccactcctgtccccagaggccagtctcccctctctcctcctcccttttgccattcactttctcccaattaaaaaaaaaacaacaaccctccacctcttgtttctaattcaaattaaaaaaaacaaaacaataacaacaacaaaaaaccctccacccaagctccattgcatggcatctttacaacagtcacttggtttacatagactcagcggaacccaccattgtctcaagtagaggccccatccagcacacatctccctctcacacccctcaggttgggtctgtcttatctccattgctgaatttgcccagatttcactaagtagccctgtgtgacctagaactggatatggagactgcgctggccccaaacacacagggatccacctgcctctgcctcctgagtactgggactgaagatgtaaatcagcatgtctggtataaataaataattttagatgaaaaagaaaaaagggttgtagggtgtggggatttagcttagtaggaaagtgctttcccagcccatgaaaggccctgggttcaatccctagcactaaaaaaatgaaagaaaaaagatactcagcagggcatagtggtttgtgtctgtaattccagcacttgagaggcaaaggcagaaagactgccatgagtttttgtgcctagcttctttcattcaaggtaacacatactgtgcttattgttttcacatggcttcaacactttcgtttgttttgaagacgggtttttctatgtagccctggctatcctggagctcacagagatccacctgcctctgcctcccaagtgctgagattaaaggcgtgcgccatcaatgcctggctggctttaacaatttgttttgttttgtttttgtttccccgagacagggtttctattgatgcctctgggaccagcctctaggcagctcagggttctgagagaagccaaggcaatggtgaagctaagaccttttctatctgagagggttagggagaagacattcacattttcttcatcatttccttttttattcattaacctcttctgatactgaaagacccctggaggctcaggcccccaggatgttggcccaggactgaggtggtggcaaaaacttgatgcaaacagcacgaggctttattatagttttttaacgagctaaccccatgttagcttggctctttcatccacccaccatggctgatggctaggaaagacagctcaaagtgtctgcatagagatcttatagggcagcgtaaggggagtgtctaggggtacgcacaggctcaggattggtgtggcttcaggcttggagggtttgccctgtgttgattggtcaactggttgttatggaccataggccctcccagggcgattgctatgctctgcgtgtcattgctgtgcacctgtccaagaagcacacccagagccataaagcgtagcaccaccagctaacttctgattggttctttgccacgaggcaggcatctgacctcctagtgaccaaggcaaggtcaggcaagcacgtgctaggctgttatggctgccgaaatggggagctggaaccttcaatacactctctgggctggatctggctgttatgtttttgtttaaattagatataaaaagaggggagcgcaagttgagacatattagccattttattataagcccggcagagtagggagactaagagagaagagaaacggggtaaatggctgaccgccatggccggtagccatagagagagagaagagaagcagaagcaaacagagcgaagaagcagcagagagagagcgcaaagcaaagaagttggaactttcaaagggaagactgtgcatacgcactgaggttccacgcatgcccagagtcctcatgtaggctgtaaatgcatggtgggtgatggcacgtcgcatgccctgactgttgtcagggggcggggtctgtctctcaaagaggtagagctgatcagcattaaagcctgaacctttcactggccacccctttaaaactgcacaaaagtgtattttttgtttgtttgtttgtttttggagacagggtttctctgtgtaacacccatggctgtcctggaactcatgctgtggaccaggctggcctcgaactcacagagatccacctgcttctgtctctagagtgctgggattaaaggtgtgtgccaccactgcatggctttttcttttcttttttaaagatttatttctttactatgtatatcatgttctgcctgcacaccaggagaggacaccagatctcattacagatggttatgagccaccattcaattgttgggaattgaattcaggacctctggaagaacagccaggactcttttattcccccctccccccccttgcccggaaaccagaacattttattttatgactgactgaaatcctcaagatgaactggatgctgcaacagctgccctcttgggtttaggtgttgtcccttcatggaatccatgtttgaatcttcgacaatttttaggtgcctcagccacccagttccgtcagtgttttgtctcttagccttggcacaccagttatactttctcttgcgcttggcagggtagccacatttgccattctgaagttggtaggccttagagccacagcggcagcacaatgctttccaaaggatgatgttcctttcgtcatcttgcttctacagctgaggccaaagagccagccagtactcttaacctctgagccatctctctagcacaaaagtgtatttatcaattgttacacaaagcatttcccaattccaaggttccccatcttaatctacatatcttattgaagggagcatcacatgtctccatgactttcatccttcattaagcattgtgtacaatacacaaataatacaagagcctctggtgtgcctgaggtgtcctgtgagcaaggtcatgggatggcaccctcagtaaaacaatcattggtctccgcttggattcctcaagtcaaagcactcctaagaagcatctgtttactctagtctctatcccatatagtgattttgctaaattcttacagagtacattcatcttacatgactaatgaagtttctgcaccccgattagcctctccactgatgcagcaatccaaatcagaccaaatcaaactgaattagaaaaagcccacgttgaatggataaaaaacgctcccacatgactttccaaactcccagggaggagactgaaaagagagactagaaaaccacatgtctattttctgggggtcagtttaaataccctgtgggagtggtcttgagcatctctgggggaggggtcatcatttgtcgggcttctggagatatggcagggtttggagagagatgagggagggggtttgaggtggaacttccatcagaacattccagactctctaggtatatggttgccaggggttgggatgaagcttctaccagaatatctaataataaaatcatcccaataaatctcaagaaaaaaacacaaaaaacaaaacaaaatttatcccaatatcccatatacatttacatcttgaagggaccagctccccatttcggcagccataacagctgaacacgtgcttgtctgaccttgccttggtcactaagaggtcagatgcctgcctcgtggcaaggaaccaatcagaagttagctggtgggctatgctttatggctctgggtgtgcttcttggacaggtgcacagcaatgacacacagagcatagcaaccaccctgggagggcctatggcccataacaaccagttgaccaatcaacacagggcaagccctccaagcctggaggcacaccaatgctgagcctgtgcgtactcctagacactccccttatgctgcccttcaagatctctatgcagatggttcgagctgtctttcctagccatcagccatggttggtggatgaaagacccgagctaacatgggttagcttgttaaaaaactacaataaagcctcgtgcagtttgcatcaaactttcgaatccacctggtgattggggtgaccatggtcctgggaaaagatcctggaggcctgagctttcctgaggtcttacaatctaagtaacttattgcagatcaatagagcataagcagacagaaatcgtctctttacagacaactctcttgcttgctggcagggtctattcaatggctacaaagaatcagttattctattgtctatctagaaagttaatttttttaatggttttttgagacagggtttctctgtattattttggagcctatcctggcactcactctgtagagcaggctggcctcaaactcacagagatccgtctgcctctgccttcccagtactgggattaaaggtgttcgccaccatgaccagaaacatttttttaaacaaattcttttattgtaagagcattttgtctgcatgtatttgtactacatgtgtgtctggagtctgtggaggtcagaagagggcactggatctcctggaactggagttacagttgtaacccatcacatgagtgttgagaactgagccttgcaagcaacaagtgctacacccctgtttttcacagagcttttaaatgaggtaatagtagttgcttaaaaatttaaaagggcctgcacttaccccaaaggccagaacaatgaagcccaggctttctggtatttaaccaatgtacactgtgagtcttgccatggcagttaaatcctcaggcgagatggcagccacccatgtgtcaccatgaggtattccacaacctaagcagacatcatgacttgctcctcttcttcttcttcttcttcttcttcttcttcttcttcttcttcttcttcttcttcttcttcttcttcttcttcttcttgagattgagaattatgctatgaaggctaagctggcctggaacttgtggtctcctgtgtcagtcttccaaggccacactgtagacaacatactgcacctggctttcagcaccttttcaaaaacagtgccagggtaggatcaaaattcttcttcggtgaccaatatcaattgtatgggaacagcactcaaatttgagttttctcctgtgatttccccacaagatgattttctggactcctagggtgtctcagttggggttactattgctgtgatgaaacagcatgaccagaaagcaagttggggaggaaagggtttatttagattacccttccatatcactgttaatcatctaagggagtcaggacaggaactcaaacagggatcaatgcagaggccatggagggtgctgcttactggcttgctctttcttcatggtttgctcaacctgctttctttctttctttccttccttctttctttcttttttaataatttagttatttttatttgcattggtgtggtgcctgcatgcatgttgtgtgagggtgtcagaccttggagttacagacagttgtgagctgccatgtgggtgctaggaattgaactagggtcctctgaaagagctgtcagtgccttaaccactgagccatctctccagatcctcaacgtgctttcttatagaaccaagaaccatcaccccagggtggccccactcacaatgggatggaccctccccatcaatcactaatgaagaaaatgctctacaggcttgcctacagcccagtcttaactgaggttccttcctctccaatgtcaagtagtgtcaagttgacataagcttattaggacacagtcaggacacaaggactctgctgtcaacctgtttagctcaacagcagtgtgagactggtggttaagatttgtggcatctacactgggaggtggtggcacacgcctttagttccagcactccggaggcagaggcaggcggatctctgtgagttcgagaccagcctggtctacaagagcaagttccaggataggctccaaaaccacagagaaaccaaaaacaaaaaagaaacgaaaccctggaacggcattaactatcatacactgattatgaaaatcaaatgtgatcatgtgctttgggggctgggaatttaacccaggcctctaccacggaatccctctctgtaatagttatttcgctccctgttcttccgtctctacggagcacattccaaggagactacgtcttccagcatgccacctcaccctttgacctcggcgcgactaaaaaggtgcgccatcgtacgccatgagccggaagactcggactcccggcatgcagcgcacagtcctcccttagacaaaatgggctgtgggcgcgtnnnnnnnnnnnnnnnnnnnnnnnnnnnnnnnnnnnnnnnnnnnnnnnnnnnnnnnnnnnnnnnnnnnnnnnnnnnnnnnnnnnnnnnnnnnnnnnnnnnnnnnnnnnnnnnnnnnnnnnnnnnnnnnnnnnnnnnnnnnnnnnnnnnnnnnnnnnnnnnnnnnnnnnnnnnnnnnnnttcgggacacggaggagatgctaagtaagaagcaggagttcctggagaagaagatcgaacaggagctgacggctgccaagaagcatggcaccaaaaacaagcgcggtgaggcggccccgaccccatcagactctccactgcctctcctaaggtcccccaggctcggactccactttgtctgactcgtttcggggtctccttcaaccctggaactcttcggctagacttcttccggtgcctctcccggcccgggaccactttccaccagactcctgtgtctccttgagccggctcacttccaccatcagactcccttcaaactcttccctcccctatcaggcctctcttgacccagatctcacagcacttaaactccgtgctcagtctgttccactctgttttactgtgttctcgctttgacctcacccaccttcccagccactgcctccacccccactttggctcatttcttttcttcatcctatcattttgtgtctctcggttcacctctgccctcctccgagcccttggtggagtctgagctgccttcggcctctgacttaggagtctttttgaaaagcctcctttatggagagaaaagaggataggggagtgaagagactctctggtacccgctctgttcacttgtgaaattgaacaagtttgagaccttggtttccgcatccactagctcggatctggccgctgtgaggcccaagatgtcactagccctatgattctcttttggttgccccatattcaggccttcttggagcttccgtattgtcagccttaccccctgtgactcaccacttccctgtcctctgctgaataaggagattggtccagtccagtcttgatgtgaattgatactacttcctgttgtgagtctgtctaggaaagtgccttgtagttttcgtaagggaaatgaatgtgaaaatgttttagtgactgtaaagaaggtttgctttttgtcacagcaacgtgagtatgaatcatagcgtggagttcttcctttgagagtgggccaaaggtgggaggggtttaggagtcgtacagacaaatattgaactcagaaggccagcagggaagtttgttctgggattgtgaactagtggatttgcctttctgaaaggattactaatacccagcacatagtaggaacttaactaacattgtaaacatctgcttgatgtattctcagaatataaaatggtctatcctgataggaggtggtggcgcccacctttaaacccagcactcgggaggcagaggcagatgggtctctgtgagttcgaggccagcttggtctacagatcgagttccaggacaggttccaaagctgcacagagaaaccctgtcgaaaaaccaaaccaaacaaaaagatggtccatccctaggatgctccttgataatagcaaacattctggaacttctgggtacccagtgcatccagtcacattcatagaggggaatcagacagcccccacttcaagcagagagacagatactggctgtgtgtgtccctgtagacctgtctgtaaccgggcactgggaggtagaggttggagggtcaaggccatctttgttgagggagcaatttcatggccaacctggcctgtgagagactctgtctctaagagagatggtgggggcaggcaagatcagagtaagtgaagaagctagccatttaggaggtgtcattgatgagcattaaacaaggaaaagttggtcatagtgagggggagcggtgctattttggtagagtggtcagggatagcctctttgaaaagttaaagtttgaactgagtcttttgaaaagaaccagctttcgggggctttttcctggctgggagaacagcataagaatggctggaaagttgtcaagattaaagaaattgaaagacctctgtagtgattgaggggagagcagagtaaataaaaggagggtatagtaggtaattaccaatacggagtcaggtagaaatataagggtatttaatagggaaaagccttacttacagagcgaaccagccagccggtggtagtctgtacagcaagaagcaaagagagagaccgaaaccgaaaacgcagtccccctactcattctgaccacgccctcataagccctcaggtactcttgtagccagcccctaagaaggcgtggctacagcttcccctacaggagggggacaggcctcgaatggctgacagtttggattctaagtggatggaaagcttttgaagggtactgttcagaagcaagccctaatcattggtaagagttttaagcatctggctgctctctggagagtgggaggggcattcgaggaagttgcaggcatccatctgtggactggacaccagttgtagctgtggagaagaacagagctgtgttcgttaatcagctcttttctctgacaactctcccttaatcagggtcctctttcaccagcggtaattagtcctggtttttgcctatctgcatgtttgaaagcttgcctcttcacagtggagtggaggagggtgtcactgcacatcctctcccatgccacaggaccccaagcacaacgtctgccacacggtaagagagcaataactcaggtctcttggtctagggctagcttagtgtctgccgttgcagaggtaactgaattggctttcaagatgcttgtagagacaaagctgacacactggagaagcaaccccagctgtaataactttgttcaaagtgatgtctgtctttttgagtttacctgtgagggtccacgttcttgtctttcttatggtcctaaggtctaatagttgtgttgttcttgtcctagcacctaacctgcttcctccgaggctgctgtgaggttctaccattaccacatgcataccacttacttaccaacccagactgttgagactctgagcatcagagatgagaaaacactgccttgtcttcctgggagaagccaggattggaaatggggggtgaggaggtggggagggccaggagtaattttagaagtcagtggtgaagtgtgtttaaatggttgaggttacagagggggaggttcttgtctggagggaaggtagggaggaggctttgtggaggaaggagaatgcggtgggccatcaggggtttagtgtgttgaggagcagtgtaaccttggagggtgacttctagctttggatcttgccctggatatgttggagagctgttggtgggagttccaggacaggctccaaagctacacagagaaactctgttgggggagggggtgggggtggattcgaatcttacagatcagggtttgagctataccttctttactgactagctatgtgtctgggcaggttactctgcctcccgttcctctgtaaatatgagtcctatcaacaggacagaataaggtatgtttgttgtgtatgcaaagtcagcacagagcttgctgtatggtaaaagatcaataactgctagacattaacattattacactgatactagcagttattcgggtgggaattaagggcctagaatagacacatggaaaatgggcaaagatatacatgtccaagacttctaaaggagagtcagaagaagcttggtggtttggtagggttattggcagtagcatgatgcagacaggaggaagacattcccaggctttcagctggggcagccgggtacatggtgatgcatggataagttaggaggtaagtggcatgtcatagtgtaatcctttgaaatttgtaaaagctttctgatgagtattacagcgtctactgaaactatggctccctgaggtgggattttacagaaatgttcactgctctatgcccagcagtatctggcttacggttaatgttcagtagatatttagtcatgaatgagaattgatttatctatttatttgtttgtttatttttggttttccaaggcagggtttctctgtatcaacagctctggcggtcctggaactcatttttgtccaccaggctggccttgaactcacagagatgctcctgcctctgcctcccaagtgctgggatcaaaggcgtgagctgctgctgccgcctcggccacctccaccacctggcaaatgagtatttattatatgactaaagccaatcttgggactggagaagtggctcaattggtaaagtacctgccatacaagcatgaggacctgagttcagatccccgcacccaggtaaaggggctcatcagtatgcccagctgtaaccccagcactggggtaaggcagagacaggcagactccttagatccgtggccagacagcctttcttaattttatagcttcaggttcagtgagtgatcctgtcttaaaaaataaaatggagagtaatagaagctatttaactttgacctttcaaccttgtttgacctctagccttaatatgcatgtgcacatacatattcatacaaccacacacaggtacacatgaaaagtatctggctggtatgttcttttatgcccggtgtaaagggaggaaaatgaggcgtaggaagtgatgtgtctcaactcagagacttgttcaagggactaggggcatcatattggctgattccgtgactgccagaggcttcacatggctggcattgtccctgcactcagtacataaccccatttatgcaaggtgtgggatgagaggggggaaagtgagacagcaccaaattctgcccatcagaatatgtatccaaattcagaagccatcttggtgatatacacattgcaaagatggtacactgccctttggaagaaaacatgaaagccagattggattatttgcactgtgtcccgggcagtggctccagtcagatgaagagagcaaaatttgggtcacatattttttttccagttcctttttgtttcctttaatcatatatttattctcatgttctggttctggtcccttactcagtgctaagaatacagaccaggacatagaccctgctacacaggagacttataaacttatcttcacttgtgaaatatctacctggctgaggtgaggattacctaagatatgtatgaaagaacaagatatatggcacttgtctgatagttaccgctgatcagatttatatggtttaattgttaatagaaacaacttcagatcgaggcctaccaacaagaaccatccaaatttttcctgggcacctttgtagacagtactctgttagtttcccaagaaaggtgaccgtatgtctcagattctcttcttgttcctccttttttccccttctttttccaacgcccacctccttgggttttgtttttgttgttttgtttttgttgttttgtttttgtttttctggagacagggtttctttgtgtaaccctggctgtcctggaattcgctctgtagaccaggctaacctcgaactcagagattgcctgcctctgcctcccaggtgctgggattaagggcatgtgttactaccatctggcccccaaacctcttaaaaagagatttatttactttttgtttatgtgtatatgtgtgttcctgtgtgtttatgtgcaccacatgtgtgcatgtgctttgggaggctctagaactggagttacaggaagttgcgagctgcctgatgtgggtgttaggggaacggtacccaggtcctctgcgggagcagcaagcaatgagttctctccaccctttttcttcactttaaaattaaattgttattgttgtttttatgattatgattatcactgttgttatcatttgggggcactcaaagcacagcacaggaagaggtcagaagacaacactcagaacttggttctctgcctctacttttctgtgggttctggggctcaaactcaagtcatcatagcaagcaccatctgaaccatcttgccagttccttgttttatttttttaaggggagtatgggcagtgagggtgtgggacttgctatgtataacccaggctacccttgaacttgtgaccccttccttgcctcagcctgctgattgcagggattctgagttacacatgtgtaccaccacacctttattttttagtgtttctctgtgtaggacagcttgatggagttggttctttccttctaccatgtgagtgggggctggggtgaactcaggtttccaggtttccaggcaagtgccctttttacctgttgagccaacttactgtcccagtttcttttctttttatggcatggtagctaattaaggaagtatctactttaggtagttcagattttctcttttcttattttaataaagaggaagagagtttgtaggaagggttaggtttttagttacacacattgtgtaagattaagcaatggggactgtggtcacacgtgtacatttctgtagatcatggaagcaaccagttcgtttactgttaggttctgctgagaatgtcggagtcggaacaatgcagaggccaggagcttatgggaactacatcttcattaaattctgctcattgctgagaccagggtagcatcctcatggttaataaagtcactaaatcatcagcatatgagacggcatctttctaaattaaatggatagtgaatgtggccttttggttcttgataatcaacatctaaaaactacagtatcttttatttttttcagacagggtttctctgtgtagccctggctgtcctggaacttacagagatcctgctgcctctgcctcccaagtgctgggatcaaagacgtggaccaccaacgcctggctcaaattacagtatctttttttttttttctctctctttttattattattaattcaagttagggaacaggcttgtttcacatgtacttcccctcttcctctccctctcccaaattacagtatcttaatagtgtgtgtgccagctggactgtctgtcccagaggcccttggatggaaaacttgaaacccatccaggaactaagcagtgggattttcccttggtgacactaattgtttgaggacatagttttatttatttcttaagacagatggggtgtcagaaaggccctgtgtgttgactttttaaacatactggtgtcttcaattcaaatgaaaaaaatccgtttttggtaagattgcatgcacatgtatgcacgtttgtgaagttttgcatatgtggaggccagaggtcaacactgagtgtcattcctcaggaggcatctgtcttattttatgagatagtgtcttccacctggcctgcctggcctgtaagcctcaagggttcctctctttctacttctctagtgatagaattaaaaatatacttcacctctcccagctttgcatgcggatgctgggactgtaactcaggtcctcatgcttgcatagtaagcattccactggctgcatgacctgcacagcctgggtgtgcatgtgtgtctgtgtgggggtggggtgtggtgtgtggagagagagggagagacagacagatacccacctatgtttgcctcctgagtgctggtactaaaagagtgttccaccacctactgtttttaaaagagaaagctgaatataatggtctctctccacctgtgattccagcacttgaacggtaaaggcagaagtttccagctagctttagtgagactctgcctttaaaaaaagtgtagaacagagaggaagagaatattcaaaaacaactttagtgctccatgcatgtgtgcgtgcacacacagcactcaggctgaaaaaggatttccatgagtttgaagccagcctggactacatagcctgttcaaatcaagcctggactaaaccaacagatgctttaggttagtcattattagtcattgaagatggatgactatatctgttagttgttgaggatgggtgattatatttggaaggaaaatctgagcacattgagaagaaacatcaatcttagctggcatctaaggcagtgggctcaagtcagcagcatctattgtgttccttgtagaagtccacatagtggtgtaggtggatagtccctgttttcatgctgcttttcctcttaccatcagtgccttgaagcttactcaccctgagtctcttttccttgtaaaaagggaatgctgtgacttccttcacagggctcgagtagaaacaagtcagcatgtctgcaggacagaggacagaggccagcacccgaagagatgtgtttcctcccttggttttccactcacagtcttgagctctgccttctccttcctatggggattcataactctgcaaggacagcacatgaagtagcagaggaaaacagcagggagagatgactctcctttggatttggctggttcatttcacccagccacccatccagggcccagatttcctttgctgcattcctgcattcctgctgcctatcgattagcctcctattgaatcaccccaacccttgccatcaggatttgcgttaggatttctggcctgtgttatagtttattttgtcttggacagctctgccagggctgagagctgtcttcccgaaggcttacgttggatcagggtggatggtcttctgtggtgaagcagcctgggctgaagtcagagagcttggggtctgatactagacaactgtgaactggaaagtgggggtggggggcaggtttggcaccctcgggccacggaggacaggtctggcaccatggctgatggagaaatctggtgcttatgtttcaagtctgcacttcttgaggacagacaaatgtttctcttaccctttgtggatgttcacccattcaatggtgggtgcctcagaatactcagaatagtccagcagaaatctgaacagcatagctcagaacatgcagggtcatgccatttgcttagggatttagtacaagctcttgagccaggtaattcccctatccccaagccagatcttcttctcaaaattgtgtgtgggtgtagcatgtgttgtaccattgagctaaatccctagttcccttctagccctttaaggagtattagctaaaggatggatgattgaaatcaccatgaatacctggctggcttgattctcccatagctggtatttccagctctacctcctccctcttccttgtaggacaaaggaaagctgtacatctctttggttgtggtgtttatatcagaagattggtgaggtgggttagtggcaacggtgctaggtttgcagtcagaagacctaggttcaccatctgcctttgcctctgcctcttggtactctggaatcctgcccaagtttccttatctttatgagcgttggcttcttcagttgcaaaattcagaatacagtatctgctatactttcttggtgtttgatgtggcatataggaacatgttgggggttgttagaaatgcatgatatctgggcagtggaggcgcacgcttttaatcccagcatttgggaggcagagacaggtggatcactgtgaggttgaggtcagcctggtctacagagcgagttccaagatagccagggctgtctccaaaaagcaaaaataaatagaataaaataaaccagacacagaggccacatcctgacttcttaaagcagaactgttgtttttgtggaatttctctgtagtttgtatgttccttgaagtttgaggggtgctcaagtgtgtatgtgtacacacgtgtgcgtgaaccacgatgcttgtgtggaggtcagagggcaacttttgggagtcatttttccctctgcatgttgaggctccatctccctgcttgctatgctttcctgtgtgctggcatactgcaggctagcaggcatgtgacttgtggttattgtgttgtctccatctactgtgggattatagatgttttctactggcttgtttttgagtcccagggattgggactgaagttactgttcttgaatggcaagcgcttttacccacaaactatcttgcttgccttgtgggatttttttggtggtgtttgtttttgagacagggtctcactttgtagcctaggctgacttcaaattggtgattcttctgtctcagtcttcctagttctgggattactgatttgtgccaccatgtctagaaagtttgagggatttcaaaaccaatttggctatcatacatcttgggggaactctggtttttccatttccatttgagactacactcttgtaactcagctggccttgaactttgcttctacctcccaaatgctggggttacaggcatgccccatcttggcccagtgacattccaagtcttgttgatctgaatacttgatagacatttgtgtttaatttcaaggactctatttttaagtgctaaggaccaaacctcgtaacttatgtatgttagctaaacaccccaccactgagccacactcttagccctgtttgtagttggatttttctttgggctgcaaacagctcccaaataaagacacagagacttaactattaattatgaatgctcagcttgagcttaggcttgttccacttaattttaacttaatttaacatatttttatttgtctcagggctttgttttacttgtatgtcctactttcttgcttcttccatgtctgtctgtctggcatctccctgttgtctctttctttctccttgagcctaaattcctcttcctacttactctccctgctcagaaatcctgcctttatcttctcccttgctgttggccattctgctttttattcaaccaatcaggtaacttaggcaggcaaggtaaaacagcaacacatctttacataattaaacaaatgcaacaaacacatcattatgttgttaaacaaatgcaatgaatctgcatagttaaataatccacaacacctgtttgttagtttgtttttgaactcctggtccttctgtccctgcttctggggtgctaggatgacatgtaccctgatttatgggtgatgagccttaaaccccagtcttgtgcattactcaagcactctaccaactgagaacatgcctagcccaaaaggtcccccccccccagataaggttcactacattgtctagattgaccttgaagttgtgatcctcaagctccagaagacctgggattacagatctgtcccattggttctgctaatgttcatcttaacaagaaagcactggggaccagttccattcctatgtgggatgagcaggcatgttttagtgggagaggtgtgctgatactgtctagttgctaggcagagtgcaggcaacagatcattgttcctgaggagtgtacaatctacttgaggtgataaacagatagtcagggcacaggatgatctgttctagaagcatcttcagaagtgcttggcactggcgttgtggcacagtgtccagcacttgggaggcagagccaggtggatccctgtgagtttgaggacagccagagctgttacacagagaaaccctgtcccgaaaaacaaagtaaaaaaacaaaaataacccctcaaccccaaaaaacaaacaaacaaaagaagtacttggtaatgcagtggcaggagctaaaatagaggagaggggagaaacctttacatttatgttttgttttgttttgttttttggttttttgagacagggtttctctgtggcttttgaggttgtcctggaactagctcttgtagaccaggctggtctcaaactcacagagatccgccagcctctgcctcccagagtgctgggattaaaggcatgcgccactaacacccggctacatttatgttttattagatagttattatgaaatctgatggaatttaagatagaaaggaatatttaagtgtttgaatttacttggaattaataagatttttattatgtatatggcttatttttatatgtatgggtgttttgcctgcgtgtatgtctgttgctgtgtgcaaacatggaagtgtatgctgtgttgtgtgtgtgtgtgtgtgtgtgtgtgtgtgtgtgtgtgtgtgtgtgcacatgcgcgtgcacgagcatatccttggctgtcctggatcaaaggtgtgcaccaccaccacccagctatgtgctgtgctttttaaaagctttgtctgagtcagaagtatcagtgatggaaaggatgtgagaatggatcgatgtttaactctgtttagtaataaaataattaatactgggatctatgttaaggtgttgtttgttctgatgatttattagcttcagaacattaattcagttagatcaattaatagcagttgttttacttcctataaaaggaagtaggaacagccaggcgttggtggcacatgcctttttaatcccagcactcgggaggcagaggcagaggatctctgtgagtttgagaccagcctggtctacaagagctagttccaggacagcctccaaagccacagagaaaccctgtctcgaaaaaccaaaaaaaaaaagaagtaggaacgaagaaccctaggaatggattctttgctattgtctctggccctgctgctcttcttgttcagacccagagaggaagggctctttagacaggctgcctagaagatgtttgcttgagacctcacactaaagtgagaaatttgatcataggacttggagatgatggctggcaaggctgacattaaaaaaaaaaaaaaaaattgttttctctctgtgcatctacctgcctgcctgccatgtgtgtggctgtcactagagaccaggagagggagtcagatgccctggagcaggtgttacaggcaattgtgatctgaaatgggtgctgggaactagggttctctggcagagcagaaagtgctcttagccactgagctctccagccccagggctaacttttttttttttttttggtttttcgagacagggtttctctgtgtagctttggagcctatcctggcactcgctctggagaccaggctggcctcgaactcacagagatccacctgcctctgcctcccgagtgctgggattaaaagcgtgcgtcatcaacacccggctccagggctgacttttaaaagcaaaatgattgctaatttcttaattttttcctcgggtggacctgttgcttttacctctccggagcactttccccataagaattgtagataggtagctcattgtcactgattgtttgacaagtccagacatcaagttgcaatgctgttgatagatagttttctgtgtcttagcattggtaacaatctgcctgctgtttaccttgttgttcctagggaaaatgtcctgcactttacagatttgatcacttttttggccttttcagcaaccccatgcattgcatggtgtctcccattctagagatgagaaagctgaaacttggattaaatggactcctggctgccttgggtgttctgaggtggctgaatcacagtggctttggtatctttaatattctcataagatcagaactttgaacactcatatactcataaattataaatctaattggaatggattttttttttttcaagacagggtttctctgtgtaacagccctaattgccctggaacttgctctgtagaccaggctggcttcaaactcaaaaagatcctcctgcctctgcctcctgagtgctgggactaaaggtgtgcaccaccactgtccagcctgggaatggattttttttttaatactcccttcacagtgtgagcacctacaagcaactacagggttttgtggcatccatagcactgtcaaatacataaggtaaatagagcggttcaaacccagggtcttgagcccagggccttgtacatgctaagcaaatgctgtactgttgagccatcaggttgtgatttgatttttatccatccatccgtttatcttgctatctttctagctatctatctctatttatttattaagacagaattacactgtctatcattgggctggcttgaaactgctgtgtagaccatgctagccttgaactcagagatctgcttgcctctgccttctgagtactgggattaaaggcacctccactatgcctggcctaggttgtgatttttagcctgattgtgcagaagaagaaactgtttcagccagtgttcttaatcactgagccatttctccagccccaactgggaccctttttaaaagttggatgaccagtttctaaattaaaagttattagtaacagtcaggtgataatagttgtgcctttagtaccatagatactaaataaatgcagttacaaaatttctcagctagtacgcactaagcagcccttggactgtatctggcatgacagtgggaagtgatcaggcagaggtgttcgcattaaggtttggtcatcgttagtgtgcaaacagtgcttgtgagcacagtcagagcattagagcgctaactgaatgctgtggactcctgaatgacttttaccaggacactggagagcatagcaggcctgaaactcaggcttccctgaaaccgtgaactgtgtccacacttgggatggaaatccctgcactctggaaatgcagagccagcaggctacccaggagtcctcagtgcagctctccccactgccacacactggggtatttgtgatgaaagaagaggcgtttggctggaaacaggctgagtttctagcattagttggtaagtggcgcacgagtctaaagagtttgaaataacggccttgaagttgagaatctgtttgtagagctgctcatctcaaaacactcagcttctctaacaagagccgttattcttagttcagaggtaagaggcagagaggccaggccaacccaggccacacagatcatcccagaaaacgagctagccattcccagagctaggagctgaggctcctggatggcatcccagggtgggctgtttatttctgttagatgatgatggcaaagaaatgaggctgatggttttaagtcctacccagttctgcaaacattttgagcacactgtgaaactgtctgcaagggccatctgggacacagttgttactctatagaggcgtccagctagctctagttcactgccattggtattcagtcacagtgtggcaagagaagggagactttaaactgggagagtcagtgccagggagtatgcatttgtgggggtgtttctgagctgggccttggcagatgaatggggcgcagaagaaacttaaggtagaggttgtggaagccagggtgcagagattagcatatgcatgtggaagatgttgggagggtgaggagagttaggcaggctacagtctgcctcagaaagccctcggtgctaagtcagagagcttgagttgtgttgagatacttaaggaggaactttgtacacccagactttgtgaggaccaacagttatctctgcagcactctgaggactttgttttatccatcattgcctgtgaggacaggataggtagaggaagggaagtcctatcggtcaccactctttctcttgttacaactttgccctggttttccttgtgcccagcatatcctgggcagtagaacaaaggaagaataccacccccacccccacacacactctgagcttgccaaaggtaaactgccttgacccaccctcatctaactagcaggctcaccacttcctggtgtttattgtgtggctctctttcagttgcctgactgattgacccagttcgccatgatctttggaattatttaatctagggctagagagagcacttagtgttcaagataatccaagccagtacccaacacccactttataagctcacagcctcatgtaactccaactccaggggaatctacaacctttggcacctgctcccatgtacaggtacacacacaattaaaattagtaaaaataagccaagcgtgctggtgcatgtctttaagctcagcacttgggaagcagaagtagatagatctctgtgacttcaaggctagtctggtcttcatagcgagttccagggcagccagggtacatagagagaccctgtatcaaagggggtgctgggcatagtaatggatgcctttaattccagcccttggaaagcagaggcaggtgactctcttagttcaagatagtatagcctccagagtgagttccaggacagggctacacggagaaacactcaaacacacaccagagccagggatacacagagaaacactgtccacacacacacacacacacacacacacacacacacacacacacacacacacacacggaggacatggacacgctccagagcacatttgggttggggaaggtttgctggagagatggctcagcagttaagagcactggctactcttccagaggtcttaggttcaattcccagtgcccatatggcagctcacaactatctgtaattccagttccagggaatctgacaccttcatacaggcatacacgaaggcaaaacactggtgcacataaaataaaaataatttattaaaatgcttttgaaattatacattttattttgcgtatattgccttatgtatatatgtaactatgtgcactgtgtgtatatctggtgctcacagaggccaaaagagggtgctggatcccttggaattggtgttacaggtggttgtgagctgccctttagaaattatttaatcttccttttattttttttttatccaagacagagacagttacttcttgaatgacaatgacctgtttctaaaatcatacatttctgtcccgcgcgctgtatgttctcgccggcaagaaatacacgcaggacactcggatcctactgcagacaagctttaatgcatcttgagagcgagagagcataagcttaccagagcggagactctgaaccaagaaacccatcccttaataaaggctggcaagcagccgcctgggacgtgttaccctatgaatggcttcagctcctcaggccaaatgagccacgggataggcagagatcaaaggaatggaaattacccagcgcctgtgaannnnnnnnnnnnnnnnnnnnnnnnnnnnnnnnnnnnnnnnnnnnnnnnnnnnnnnnnnnnnnnnnnnnnnnnnnnnnnnnnnnnnnnnnnnnnnnnnnnnnnnnnnnnnnnnnnnnnnnnnnnnnnnnnnnnnnnnnnnnnnnnnnnnnnnnnnnnnnnnnnnnnnnnnnnnnnnnnnnnnnnnnnnnnnnnnnnnnnnnnnnnnnnnnnnnnnnnnnnnnnnnnnnnnnnnnnnnnnnnnnnnnnnnnnnnnnnnnnnnnnnnnnnnnnnnnnnnnnnnnnnnnnnnnnnnnnnnnnnnnnnnnnnnnnnnnnnnnnnnnnnnnnnnnnnnnnnnnnnnnnnnnnnnnnnnnnnnnnnnnnnnnnnnnnnnnnnnnnnnnnnnnnnnnnnnnnnnnnnnnnnnnnnnnnnnnnnnnnnnnnnnnnnnnnnnnnnnnnnnnnnnnnnnnnnnnnnnnnnnnnnnnnnnnnnnnnnnnnnnnnnnnnnnnnnnnnnnnnnnnnnnnnnnnnnnnnnnnnnnnnnnnnnnnnnnnnnnnnnnnnnnnnnnnnnnnnnnnnnnnnnnnnnnnnnnnnnnnnnnnnnnnnnnnnnnnnnnnnnnnnnnnnnnnnnnnnnnnnnnnnnnnnnnnnnnnnnnnnnnnnnnnnnnnnnnnnnnnnnnnnnnnnnnnnnnnnnnnnnnnnnnnnnnnnnnnnnnnnnnnnnnnnnnnnnnnnnnnnnnnnnnnnnnnnnnnnnnnnnnnnnnnnnnnnnnnnnnnnnnnnnnnnnnnnnnnnnnnnnnnnnnnnnnnnnnnnnnnnnnnnnnnnnnnnnnnnnnnnnnnnnnnnnnnnnnnnnnnnnnnnnnnnnnnnnnnnnnnnnnnnnnnnnnnnnnnnnnnnnnnnnnnnnnnnnnnnnnnnnnnnnnnnnnnnnnnnnnnnnnnnnnnnnnnnnnnnnnnnnnnnnnnnnnnnnnnnnnnnnnnnnnnnnnnnnnnnnnnnnnnnnnnnnnnnnnnnnnnnnnnnnnnnnnnnnnnnnnnnnnnnnnnnnnnnnnnnnnnnnnnnnnnnnnnnnnnnnnnnnnnnnnnnnnnnnnnnnnnnnnnnnnnnnnnnnnnnnnnnnnnnnnnnnnnnnnnnnnnnnnnnnnnnnnnnnnnnnnnnnnnnnnnnnnnnnnnnnnnnnnnnnnnnnnnnnnnnnnnnnnnnnnnnnnnnnnnnnnnnnnnnnnnnnnnnnnnnnnnnnnnnnnnnnnnnnnnnnnnnnnnnnnnnnnnnnnnnnnnnnnnnnnnnnnnaattttggacttctttaagattgttacaacagtgagaaaggtcaaaatagctcctagtaaaagcacagaagcctctatattaacctcccaaaatagcaacattcccaagccaaagtccagaaaaaacatacctctccgaatttaccaccctgcagttctgaatccgccccgttagaggggtctccgcggtgccagcgatgttaacaaattcccgggtttcggcaccatatgtcccgcgcgctgtatgttctcgccggcaagaaatacacgcaggacactcggatcctactgcagacaagctttaatgcatcttgagagcgagagagcataagcttaccagagcggagactctgaaccaagaaacccatcccttaataaaggctggcaagcagccgcctgggacgtgttaccctatgaatggcttcagctcctcaggccaaatgagccacgggataggcagagatcaaaggaatggaaattacccagcgcctgtgaagtaatttacattttggtgtcttcaggcaccattattgtaatggagaatgcaggaacggctccctacacatttccaattaagtccagacttttatgtcactcacacaaaaaaaatctgggttcctagccttaccttaaggccttggggtctcaagacagtgcactcaggttctggttgtaatactgtgtattttggggtaagtgccttcttatttttgggccttattttctcagcaataaaaggaagatgggctaaatgagtgctgagactccttcatgctctataattctcagagtcaacaggtgccacattactgtaacctccagagagccaggtgttgctccaagcagtttgcctgtgtaaaaagatgaagtaagtcagccttcattttgttggttgacagcttggtcagtctagggcagccacagctgttttgtagaaggtgctgaggttttttccatttcagttcctagtttagaggctagagctcttttggctgctcccctgatccaatccaggcagtagcacaattcagataggcatttctcctggctcccaagctttctttggatccataacaacctaaccatttggtgaatcaaacacagatttctttttggtctgagcaacctaaggttttactgaggaaaaatctaacagggaccagttaagccccagagatatatcccttgataggattttacttccttgctgaccacctatgaggtcatcaggtgtagaggatttgtctcctgtgtaaggataatggagaaagggaccagttgttaagggttggcctaccttgagtattttgtattaagtgtactctaataatctggtggtgactgagacaccatctctgctgggatgctgggaatgtcaggaagaccagctggcttctctctgaaggcctcagtgttgagtgtaagtcctggccccaccatgagcagctaagcctcttaatatggaaaacactctgcttctaaatgaggacttttaaacctcaagtcccaagttgttcccattctagtggctcactcctttttattgactcccacagaacattgttgtctcctaagaaactttggaaagccagagaactccagagctcattttgtcacataggagggtatcccaggcccaaagaggctagatggcttgttaacagtgacacagctcactgcagacaaaaaggaatggaacccgtggtggaacacgaagaaataaaagacccagagacagatattggggttcaaacttcaagcagaaaagcaaagcagctggcattagcttcttacctctacctcaggctgaatgggctgatcctgtctccatgagctttcaccaagccacagtttgtaacctctcctcagcatggctggagaatgcatgccttctacttaatgtttgatactgacttatatacctttcatgagtcctgggattaaaggtgtgagctataattttcttttagactgtttcaactttgtgtagatctgggtggccttgaacccacagatatccgtctacctcttaatcctgagtcctaggattaaaggtgtgtgcctgacttctatggcttgtggctaactttgttttctgaatcctcaggcaagctttaataaattgtaaataatatatcaccacaccatggtgcctgtctccttgttcagtgacgtctgccttgatgctttctgacagacagactagcactgtggctcaatgttgccaaccctgccaggatggttttgaaaatagctttgcggtgcagaaagccagcatggaagagatgaaatgaacagttgctattttgaggtttgttttctttggagttctaagtggctgtaggtggtttggccagctggcacagcctgggtggaggatctcaaaccccagtggctgctgctgctacatttttactccgtgataaggctaagaagacattagctttcactggttacagtttcctccaatgcaaaggatcagactaattctcccttttcacccacttaggatttaggaggatttagagacccaagaaaaagttggcatagaagtatataggagtttcctttttaatttttaaaaatgatttgcttatttttatttcatgtgcattggtgttttgcctgcatggatgcctgtatgagggtcccagatcccctagaactggacttacaggtggttataagctgccatatgggtggctgggaattgaacccaggtcctctggaagagcagccagtgctcttaaccattgagccatctctccaaccctgactgtgtgtgcgtgtgtgtgtgtgtgtgtgtgtgtgtgtgtgtgtgtgtgtgtgtgtgtgtgtgtgtgtttttaaataaaaatgtatctgaaatgtagctaacttttaccaatatgtacctgtgaaaactcccttccccctttaagctgtctgaagtctccacctttggtagtcttgaccttatagccagccactcaggacttagaggagacagtgtttatctcaacaggtgcttccaaacccttgcagtgcagggtgctaggtattgtagggagatcagaaatgatcagtggctgtctgttgtctctcacttctagcacatcgggttgtgaccatagtccaagggagaaatccaggactgagagcttctagaagagggattactgcttactaggagaggaacgggtttaggatttatatagacatgggtgttgtccttccagtgtttgtaaatactttcagcctcttgcgactggttctccccctacttaaataataataaatactaattttattttgcatgtatgggtattttgcctgcatgtacatctgtgtgccaagtgcaggtagtgcctgtggaggccagaaggagggctttggactcacaggagtctatgctcttaaccactgagctgtttcttcaggttccagctggttctttgcactctagctccctatggagaggagcaggtgctgcctcagagctgtaccttctccctggcaggcacaaaacaagcagtccctctcttcctcttcagcccaggatcccataagctgacctgtgttttcagagtgtacgaccacacatctgagatgattttggcttaagtgtctctgctttcttcggttgcatagtttagaaacaggacacttcctttttcttaagtgaaaacagaatcaagagcaagttttccaatcctttttttttttttttttttttttttaaattttgaagtacagtagaggttttaactgctaacaggacgtatggctctctggtcaatgggagtgaggaaggccatgtccaaattaggttcctggtgacccacttttataaaggttcctaaggtggagtcagtgtggagaggcaacaccctggatgtctgagagttgtaatctcctcactgctcatgtgtagacggtagatagggaagaaggcaacggctcagcctggctcgggttctagtgagtccttgactcttagaaatagaaaccagggattatttgagtttatccccatttacagataagagaaggaaggcttgtggccagagccagatatggagtcatggatggaagagggtggtagcgaggagaagggtggatagtatggcaggagcacctccagtgtttggagccaggaatagccaagggctaaggaggtagggcaggccaggaaggtactgactgtcagctgtctgaggggcaggccaagggagccatagacattctacaccagtctaaagatttcgaatggctggaggattttcatggctaacccttcttatattagttagctctggccgccctaacaggatgctgtgcaccgggtcgcttagcagaaagcagctttcccacagttccgagattggaagttgaagatggagttgggggatggccttcttggcttgttaatggcctctttgtccttacatggcctttccttggccgttgcccatacctgtgtgtgtgttggtggtggtggggtggcatggggaatggggatcttgacagctagccatttctccagcttccctaattacctcttaaaggctccatctccaaatactgacacatcagaggttagggcttcagcctgtgaacggggagacaaaagcagcccatagctgttttttacttctgatgaactactttggtcttttaggggtaggggtgattcctcttgaaggcagcttgttttccttttttctttttttctttgtgtgtgtgtgtgtgtgtgtgtgtgtgtgtgtgtgtgtgtgtgtgtgtgtgtgtgtgtgtgtgtgtgtgtgtgtctatgttttcatgtgtggccatgtgaaggtccacggttctccctttttcattcttgtggcaagtgcttacccattgagccgtcaccctaatacctctccccctttaagtatctttattatgtcctttaatcattttgtttgttttgttttgttttgagacagggtttctctgtgtagctttggaggctgtcctggtactcactctgtagaccaggctggcctcgaactcatagatccacctgcctctctgtcctttaatcttttaacaattatattgtatgtatgtatgtatgtatgtatgtatgtatgtatgtatacaggcacctgccacagtgcatgtttagaggtcaaaggacacatgtaggagttagttctgtcttctgttgtgtgggtcttgtggatggaactcaggtcattagtctttatttactgagctgtctcatctcctacctcttgtttttgagatggtgtttaacagctcaggctggcttgtactcactatataactaaggatgtccttgaacttctgattgtcctgcctctgtaccttctgagactatacccatattgctagggatctgcatcacaacactcaatttatgtgatccagaagctagaacccagtacttcctgtgtgctaaaactgtgccctctaccatctaaactatatcctcagcactcttcttgtttgtcttacctagtctgtctttgccttctgagtgctaagattgtaggggcaacacattgtgctcaattaagaatcctttcttttcctttcctttcctttcctttcttttctttccttctcttttctcttttcttttcttctcttctttctttttgagacagggtttctctgtgtaacagcactggctgttctgaaactcaatttgtagaccaggctggcctcaaactcagaaattcacctgcctatgcatcccaaatgctgggattaaaggtgtgtgccaccactgcctggcaggaatcctgctttctgatcacttcctactctattcttttttttatagtactggtctacaatctagcaccattgtgactttattgaagggagcagtgattattttcatccaatgtttgaatttctgataattctgtgcagtttggagtttgtcctccagttttgttattctcacatatatggcatgttttatctactgtgtttccagggaagatcaggtggtgagctcctgacctgtctgctattgggtttagtgctggagattgaacccggggctttgtgaatacggacccagcactttccagcctcagacttggaatgtagccaacaataaacatgaacttcagatcctcctgtccaccttctaaggactaggattataagcttgtggcaccatatctgatttttgcaatgctgtggatggaactcaaagcctttcaaatgctaggcaaatactcttgatctgagctgcatctctagcctcctgttctgtgttttaattgtgttaaaatatatatgacataaaacacaaaacttgccattttaatgacttgtaaatggctttgtgatattaagtatacttatactgttaaattgctctatatttactgtttttatgtgcattggtgttttgcctgtgtgtgtctgtgtgaggttgtcagatcccctagaactggagttacagacagttgtgacctgccatgtgggtgctgggaattgaacccaggccctctggaagagcagtcagtgctcttaactgctgagccatctctccagtccctgcgtttactcttaagcaaacctgttttttgttttgttttgttttgttttttgagacagggtttctctggctttggaggctgtcctggaactagctcttgtagaccaggctggtctcaaactcacagagatctgcctgcctctgcctcccgagtgctgggactaaaggcgtgcaccaccacctcccggtacaaacctgttcttatgtttagttctttcctgctattaagatgagctgtttctgaaacagatgggatggcagaagggttctggagttagaggaactcagctggaattcaggctccctcacttgctacatgcagttgttttggtttgctgttgagtgttcagtacttcaggcagacttggagcaccctgagggtggccttgattaagagagtctcccgagaaccagaattgcaagcagagcctgctggctttagttagttactctgcagcaaaggagtttattggcccacaggactgtgagaacagtcagggtgcggctgaactctcttctgccagtcacctccattctcttggctccctcctctaaacctagtcatgacagctggcctgtgtagtttatagtttttttcctggaaggaaaattcctcttacctcctttcctctcccattagagttagaaaactcacagaaaaggatcctgatgggctactggagtcatgtgttcatgactagccaatcactacaagccagaggatgtcaagtctgtggataacaggcctgtcccaccctgtgatagggaagcagtctctttgccaaggccagggctttaagggactgtccttaggaaaacagttgtccaccttaccttacctttcctgcttcctgatctggcttattgccctgctcaggtgttttttcccagcccaagcagggcttgtagggaggcaggagacacactccttcactggctgcctatcaggatctgctgaacacgctgcccagggcttgaacacttgctgtgtatagggatcctgagagagtggcacacattctagttaaggctgcacattttagttaagctgcatgcagagtaaagggagacatgcatcaggattccaggactctgaggttctgtgtcctatttttgtatgggccaagaaaggttgccttttctcaaaagagagcctttttttttttttttttttgccatttcccctgctgccgtttggacagggaaatgctgtggctctgcagccctctctctccctgtgactgactgactgactgactgactgactgactgactgactgactgactgactgactcgggaagggcaggctgctttggtctcttgctctacttgactaacagttgcacacactggaagcattttctgctgacattcctctttccccacttccacataaatgtccccaacccccagctctctgttgtcacctcagttgccagggcactcatgcttgctcaggcagaaggggcttttgttggcatggattcagttggaagcagaggaagaaaagccagttggaaaagaaacagtgcaccccagcctgggaacagaaaccaagagcaggcagtttccctctgtctcaggctaagggtgtctagaccagggcctggcatgtaggggaagagcatcatgcttcttcttcctgtggacaggaccagaccacacagctcaacacagagaggtactgaggaaaagtttgcagccttcagtgtagctgccattctctctgcaagaaattggctgtctttttttgcttgtatttttttctgtttagaaagttgtataaatgataacaacttgaaaagtaccttgcttggctacccactcttcccgagattcccaggtataagacccaaaggtgggctttgagatactgacaagcctgtgcgttgtgatatacatacccagatatggtaactgttaggaactgttggatcctgtgctcttagtagttttacttttttattttttaatggatttggatcaagcatgtgacacacactgtagtcctagcagtcagagggcaggaggatcacaaatgccaggccagcctggtcttcatagtaaggctgtgttcaaacagaactaaacaaaacaaaaaattgggggaagtccctggattacatcttcattaaatggatttagaaaatgtggatttaaatgtcagctattgtttgaatttacagaaagacctgaaaatgctttcccccctcaagacccatcttgtcttctctgagtcactggtctgagaaatgttagtcatctcctcacctggctccccattagcaacctgtgatcccctcccctttcctccctgctgtgggttcagacaagtggggtgatacaggcccaggggatcatcctcctggctgggcctcaggttcaagcaagcccttctctccaaacctccagttcaggcctttgaaatccaaacgctccccgttgggtcaccagtgcccactccccacatcagccaagccatccttctgcactgtagtctgtttctgttctgttctgttcttttctgttctgagtcacccagtagcttcccaatgactgggataaagtccagcggcagcgccttaacaaagatgttttttcagctctctcacacctctggggtctcctgcctgagattccagcccctgtctcttcccttcctgtagagtatgtgctaactacctctagaaaaatgtcaagaacaagataaaagtcttgatgtaatagaaagaatttgtttatttcatctgagttgtgtaactcattgacttggagttgttcgtaacagtcccttaccctttaaatagcggtgggatctgtagggaatcccacatttcttactcctgctgtttatcatcttttatttccttgtctagaagttcagtttgttttgtttttcatggcagggtttctctgtgtagccctgcctgccctggaacttgctctgttgctctgtaggccaggctggcctcaaactcacagaggtctgtctgcctctctgcctctctgcctctctgcctctctgcctctctgcctctctgcctctctgcctctctgcctctctgcctctctgcctctctgcctctctgcctctgcctctgcctctgcctcttgagtgctggaatttcatgcgccctttgtatgctttaagttctgtattatttttgagtgctggaatttcatgcgccctttgtatgctttaagttctgtattattttgttgttgctcatcaagacttaaataactgaagtctatacgtggttacctatgtatttgtcctttgtaatgctcttcatctcatacctttatataaatctgtctttcatctggtgccattttccttctgactcaaagagtatgtgtgatgaggaattttttcagtttttctgtacctgatgaactctattttacccttgttttggggaaatttttctgtatttagaattctagggtgacacaattttatggactctcccccccctttttttttttattaagaatctgactctatagcccagactggcctgaaattagaaatcttcctatctcagcttcccaaggactgaggttacaagcatgccccacaatgcatagctgtttctggtactttaatttttttaattaaaattagtgtgtgtgtgtgtgtgtgtgtgtgtgtgtgtgtgtgtgtgtgtatgtgtgtgtgtgtgtattcgcgcacgcgcgcaagtttgtgtttgtgagtgctggtgcccatgtggtacagtgcacaagtgaaggtcagaggacatctcccaggagtatgtcctctcctttccactgtggcttcctgggacacttctgttactttaaagactgctccagtgaactgtgggtggagcccagtggtggagcacttgtctaacatggttgagaccctgcatttagcctccagcagtacaacaaatgaagacgttgttccactggcatctttttgttgttcttaaaacagggtgtcaacaggcagtggcggcacttgggaggcagagacaagtggatctctgtgagttcaaggccagcctgggctttataagaaccagaggctggagagatggctcagcagtcaagaacattttggcagaagacccggctgggttcaattcccagcactcatggcagctcacaactgtctgtgactccagttctaggggacctaatgttctcctctgacctctgcaggctccggcatgcatgtggtatacacacagaggcacacacatacacaagtacataaaaataagacaaataaattagaaatttaaaaaaaccaatctaagaacaaaagtatcttctaattctgacatttgtgttcaagttactttgtgacttgagtatttcttatgttatggttattacctcccccctcttacatgatcagaaacttttggttgaatctcaaatgtaaatttttccttgttgaatgctatattcctgtattttttgttgttgtttttgtctttttgagaccgggttctctgtgtagctttggagcctgtcctggaactagctcttgtagcccaggctggtcttgaactcacagacatccacctgcctctgcctcccaagtgctgggactaaaggcatgcaccaccaccttccggctatatttctgtatttttatagactttttttcttgggaacagtttgtccttttaagatttattagctatggctgacaatggtggtacaggtgactaatgccagtactgaagcagaattgtgagtttgaggccagcctagactctatgttgcgtgtggacttattttaaaaatccccacagtgggtatatgtatagttgtaatcccagcaggaggatgacctggagttcaaggctacttgagaacctcttaaacttaagaaaaatggctagggttggaggtatagcctggtgctagaacatgtatttctctatgagttattgggttcagttaccagcacaggagggagcaaaaagcaaagaaagagatggccttggtgcaggggagccatgctaaagaacctctgagcaggggaggaacttagaagttaaggagatggctggaggggtcttgactgcagttcttcccgagtgacatttgtggccagcattaaacctgggcactgacttcctctgcccagctggagtagctgagttcagaggccagcagaagtctctgatctgtctgacacaggttgtgaaaccagtcaagacgagagaggctgctaatgccccacacagaataactgtgattatgtgacatactcaggaagtgacatgtggggggggtttaattacatttcaggatgatacacgtccatcaggagagttttacctttgtgtttttgttagtctgttagtggaaatctcaaaattctatgagctcctatattttttaagttggaggaagactaagggaaaatatgttccccactcccatgcttttcctggggaggccaaggccatgaagatgtgaggggctcttacttgtgacataatttggtgatgacatagctggagctagattccatatacagaaccatggggtgtgtattgcaggtgctgtcaggacccaagtatctctcagagagtagagagtgctgtccattcagaacaccacacttaagattcttgtctgttatctttaatgctgtgacctcaagcaaggtattgagcttgttttcagttggatatagcttaactgcctgaaggcaagctgttataccaagataattctttttggtttcccccagaggtaagctgaatgtccaacactgtcaagtagcagatgggccgtcgtaggctctatggtgacctgaaaagtacactatgcctcttttaaagctggacatggatagtgcacacctgtaatctcagtgtgtaaaggctgtaaggcaaggaggaccaagaatttaaagccggccagggttacatagtgaggccaggtcttaaagcgagagatagatagatagatagatagatagatagatagatagatagataaatagatagatcaatcaatcaaagggatgctggctgctgcttagctccagcaggttggtgctgcagagtgggccctgtgttgccacatagtcggcatttacagaggaacccccaaatgtggatttgtgggtaaaatatataaataccatatcacccgttaagaccttttgtctgtttatttacctattcatttttctttgtttgtttttgtttttttgaaacagagtttctctgtatggctttggagcctgtcctggaactcactctgtagactaggctggcctcgaactcacagagatctatctgcctgtctctgtccctcaagtgctgggattaaagttgtgtgtcaccatcacctggtttttattttattttttgagatagggtctcatatatatatatatatatatatatatatatatatatatatatgccagactggtttcagtccatggatacagccatttttatgaatttgttttccttccttgacagtggatctcacttttgaagtgcacaccagcttccaactcaaaatcttcctgcctcagcctcatgagtgctgggattacattttaattaagacagaacttatgtgtggactatactggttctcagtttgaactttgagagccatttaagtgggattcagcctggctggtaaacagaaaaagaccttggctttgggtagatcctcaacagcctttcctaaggtccctggcctggcctgagttatcaccgatgctacttcctggttgcttcctgtgtttgtgaattgaaggaatcctagtgggcattgacaaaagtgtgtggacaaatgacagtttgagaaacaatgttgcgataaatctttctgccaaaagccacctgagccccactgccacatgggtggtctacgccagctgcctgcctgagttagggccccaattaatgcacagagagacttgtattaggtctctctgcttggccaatgactaggattctcatctgttagctcagtctccattatcataaacctatatattttataagacttatcttatagaggatgcctttggctggcaccctctcttgccggtggctcacatggcgccgctggaggaggaaggggaaaagggggacacttcctgtttctccttgctaaatatgagtctccttgccatgtcacttcctgcctggatcaccacttctctactacatttcccagaatcctctttgactcctagtcctgtctaacttgctgtcttattggccaaacagtattttattcaataaccaataagataaacataaaaagaagtacattccccatcatctcctcttttctgtctaaataaaaaggataacttatcttttataataactgaagaaaactataactataactatctgtcttcaactctatcaaaaaccacagaaggaaaatatataaactctagaattgacagacacatctcgatacctggacagtcacccaagttcctctgtaacgttggggcatccatcttcagcctataaggccacagtgtgtctggcacacttctccatttcaacaacaaccgttcagtactgtcttgttttgtaagttcagcagtcactttcttgtgggtcctgcatgttccagtttatacagcaacaaacagtccaggcaagagcagtttcttgcccaaatggctaatcttgccttgttgaaagcaaactccataacaagtttcttcgatacccatcctcctttctgacataattggtgtcccaggagcagttgtgtctcactgccaagaaaaaccctaaaccatttaaatgccatatttctgtaggtctttgaaaggtttgaagaatacctatccatctcaaatacatctctgtatatctagaaaacctaactaacctaattataagttctgactatcataggtgactatataacctgtatttaattatgtatatcattttaaaagatctgtataaacacaatatctaaacaagaggagacatatacatatcacaaaattgaccttaaagttgtatcaataaatgaaaatctataccaatgcaaagtattcattcctatatcctaaaacatagaaatctgaccaagtccttgttttcatagtctgaaaggctgtatcgtctcagcttttttggatgtaggatcagttgggtcactgcttcgggggtcttgcttgatcaaaccatattagtctggaaggaatccatagctttttattttctgtggaaacacaaacagaaattctttttccaagtagcctgtccttagacttaaattttgaagtcaaagtatttttaaaatttataagttggattaatttagcagcatttataatcaaatgtattttagcagcagtaagtctttcctcagcaatcaaacaatttaaagacaacaatatggcatatagtatccagattctctgtgtattttccatctttatgtgactttttttattactttatttttactttcttttgtttcttttttcccctgagacagggtttctctgtggaaatcgcctgcctctgcttccttcagcaaatcctactggtgtgtaccaccacaaccggctactctatttcctcctgctatttttttctctcacaagcctacatatatttttaaacgcagtgtaaacctttagaggtttttctttatctggatttgtctttatcatctcagaagtgccgagtccaacgcccaagagcgccgggagggcgtgagcctatggaagcttctctgatgcctctgagcggcccgacagggccggctgtggcggcaggttttcctctttctctgggaaccttggggcagggggtcatcccgctcactgacaccattctgttacgataccgcctgaaccccaccaccacgtgggtggtctacgccagccacccgcctgagttagggccccaattaatgcacagagagacttgtattaggtacaatgctgcttggccaatgactagcattctcatctgttagctcagtctcaatgattataaatctatatattttataaaacttatcttatagaggatgccttttgctggcactgcttttggcggaaagatttatcataacaaaacaaagttcttcccaagagcctttttcccaagcaaaggtcattttcgggccggagataagtctagggaccattaaggggtgagaggacagaagacactgacaggcaaaggtaagatgcagctgagttgggcacctgctgccttcatgctttcacagggttctgctgtgaggagtctaggagccgaggatccgcactcggggaagctatctttcttttccttggcatttgcaaagcacctccttggtagcccggttctgtggggtcactaacctatgtggaaacatgctaacatagtgatttttatcatatatgttttaaaaaccagtttaaaatccactgggaaataattttttgtccagtcagagaatttactgcttgtcatggttgccagctggtagtttctgggcagactgagtcccctgatgcctttggtgccaaactgttagcttgcaaagttggggtgcagaaggcagagcaataggctcaaacggaagtaggccagtgcctgctgctcttcagagagagggtgggccctgcaacaggcagcctgatattgagccttcctgctccttttttaaaaatattacactggggtgtgtgtttgtgtgtgtgtgtgtgtgtgtgtgtgtgtgtgtgtgtgtgtggtgttccaagttgctgagaactgaacccaggatttagcacatgataagactatgctttaccactaacctacattccccgccccagaatctcttgttcacaaattgttaatattcatgcgtgcgcgtgcatgcatgcatgcaagtggacgagtgtgcgtgggcactcacatgccacacacagtgtgctaagagatcataggacaacttgtaggaattggttctccttttaccatgtggagttcagaggttgaactcctttcatcagcttgagagcaagtgtctttacctgttgggtcagctcaccagccaggcgccatcccctaccttcctaactgcctctgacctgggattacaggcctcacctggtttctgtgcttctggggatagaacccagggctttgtgtgcactaggcaccaagctgcatccctgcctctgtgtgacttgggcagatgatgaactctttgcgcctcagtattctaatgtgttaaatcagacaataataatacctacctatggggttgttgggggatggtagatgaccaacaaccctcaaacaaaaaaaaagccagtcataatacccatcatcctgtagagcatgttgtgcaaggcaaggaaagaggcagaggggaaagaagcaagcagaatggagtgaacgcctcaatcatccagtattcctgtgaagattatcttcccttctgcccacgaaggtgctagtaacactctcactttgcatctgacaaaacacactgagagaggtgtaataacttaacctgcctcttgctcagcatcagggccagaattctgtccagtcttgatagtaaaccccattgtaggggtcactctgaccacaccctagcagaatgacccctacctcaccccatgatctcttcctctatgtcctagagctgattggcttcagccaagggttggggatgactaggctggcattggctagagtgataaaatgcttttgtatgcgatacatgtatgagtgtggctgtggctgtgtgttggagtgtgtgcacaggaatgtcgaggccagagatcagtgccaggtgtcttccttagtcatgctctaccttattttttaatgtagagtcctcactaagccgagagcgcactgatccaggaaggctagctagccatgggattacaggtaatctacctggctttttacatggttgctggggtcaggaagcacttgtttttcccaagctggtttattttgttttgtttcaagatagaatttctcgggctggagagatggctcagaggttaagagcactggctgctcttccagaggtcctgagttcaattcccagcaaccacatggtggctcacaaacatctgttacgagatctggtgccctcttctggggtgcagatatacatggaagcagaatgttgtatacataataaatgaataaaatcttaaaaaaaataaaaagataggatttatctgtgtagtcctggctgtcctggaacttgctctgtagaccaggctggcctcaaactcagagattgcctgcctctgtctcccaagtgctgggatcaagtgtatgccactaccacccggctccacaccgtgttttgcagatgttcatgtgtatacgtctgtgtgtacacatgcccactggttgttttgttgctgtttttttgttgtgttttgtttttaaaccttggcactggtgattatattttcctattaaaatcaattctgtccagaagttctgtagttacatagaccagtgacagacattttctgagcacttatttcattcagactctgcatgtcacatacataactcattctgatcagcacaataacctcttgagattggtgttgtcacagtaagggttagtgaggttaggaaattggctcagggcagtaatggtagagctggacttggtagctggccaccgggacttcctaaaccactgttaaaacatgctgtaacccagcagatcctaagttttctggaccatgtaggtgtctcttctagttgttcatagaacacactgtgtgctgtttcagtgcttctgggtggctcagcattctgtgaagttgttattgtggggcttatttctttcatctttgtctgtgttacacagataagaggcttctttttctctagaatcttcctctgcagagagtactgtactgcctgtgtactccctgtgtgtctgctgatgaagtcagcagggtttcagactcccatttcctggtcatacacaagtacttattttaccatctctaaatggagtacattagctccgggccacgtagagcaaattagggagcagggagatagatcacgagaatgaggctgcttggaaaatgtgtctgtgcttctggcctgaactccctagctgtgtgggaataaatacagtgatgttggggtatcatttcaaggctgttgcagaatgagactggctggtctacaggtgatcctgaaacaaagcaacctgtctttataggtgcttttttgcttctgggaactttaaaaaaatgtattacatttattttagagaggtgtgtgtgtgtatgtgtatcagaggacaacttataggaaacaatatctctcctaccatgtggatcctagggatctaacttgatcatcatgcttgctggcaagtgcccttgcctgctcatcatcttatccgtcttactggacctggtttctgaggagtaactaaagcccaagctggtccagctgccttcatacaggataggaaaatgaaaactccaccctgacccagctgtaggcaagatcacagcacctactcagagaaaatacccttgacctgggtcaaccgtcatcccccccccccacctccctcccttccttccttcctctctctctccctccctccctccctccccctcctgttgctcaggatgccttattctgttgctcaggatggatggcctggaattgcagatggagccaccatgcctgacctctttttcttctgactgaggactagaagagcacactgtcatttttcagctctttcatgggtcagcacaagtctcaaacaagatttgcaaagggcagagttgaggactgaagtgaaaggagctgggacatggttccacagttgagaatgccactcttgcagaggacctagagctcagttcccagaacttacatgggtggctcagaccaccataactctagctcaaaggactccaacaccctctcctggctgatagctgctcctgccaacagattggcttctttagtttcatttaactgtgattttgactttgtgtcttgtcttgttctcatacacaggacagatgacagatgagtgcctgtgtctgtcttgttctcatacacaggatggatgacagatgagcgcctgctctgcttccagcacatgatcagtggcttgatgcctagttgtggtcatggttctccagaaatcttcattcacagcagaatgaggcaagagcccttgaaagatggctagaggcaggtgaatcaagccccctcatctgcctttggctcactgcctgctgtggtcctaccatgcatgcccacgccactgagggttcttcatagtcttattaatgctggaggcgcagtgttgcctttttgagggaaatagcctctggagtgtgctggtgtttgctgtgtggtttatgctgattaggaaggaagtgcacacacccctcacccgcaacctgtcatcacttctgatgtttgctttcagttgtaattcatggcttttggaaggactgcagacactgccattcacttctgtgagagctggttcctgccctccttttccatgctggggctctccgtgcccatagggagtgtgcagatatgctttcttcaagtccattgagatgctttgagctattttcacctgtactgaatgtggggcacatcacaacacttagacctctcttcttccaggagaatctagttgatcttggtctacaagaaaggaaatcttccctagttacatccaactgacgcatcctctgttgtcactgtcagatgccttgtagaaggagtttccagtcctgggtgaatgaatgttttccctactagttgctctgcttcttggggtgtctcttgcatgctgtcttttaaatagctgttaggagggtctaatgaagcaactgtctggagaccaatgtttatttcaacatggttgcagttgcttttgcttcagctttcagagccaataaagctggttattagattctgtaattgctgctgtaattactctcttggaactggcaaaggcataattaaatatggagatttcacagactttttctcatctaaaaacaacctcgtaaacttctgttagcagggttaaatttctgctgctaaagccagtgaatttacaaatgacactgagttttgtggctgaagatgaatttctttggatactatttctttgaagatttggctttgatgaacagctgttattagcctggaagctatttctttaatacaaccacccagaatttgggaaggttggcaagtccttacaagctagtttgcatttatttatgtaaatactgggtttgggctctgtggactttggctacttaggaaaacgagtctggttggaaatctggttagagctgggtgtggtggctcatacctataatcctagcacctgggaggctgagtatgctgattgctgagagttcagggccagtctagactacagtaaattccaagcctgcctgaactatagtataggaaaggccttgtctcaaactctccaccccaggtagacatccctgtgggaagaagggagttttacgtggacagtgttcagagggagcatgtcacgtgacccgtgggagcacctgcttcccctaagttatcctcactgtagtgtctcacatctgtatggtgtagggagtgctgtgatacttgtgttcacacacatccttgtggaccagatggcacttttcatggttacaggggtttattttggtgttttgttttgtttcaattttggtttggtgttttgtttggttttggtttttcgagacaggatttctctatagcttgaaccctgtcttagaactcactctgtagaccaggctggccttgaactcacagaaatccacctgtctctgcctcccgaatgctggaattgaaggtgtgcaccaccatggcctgtcagggttactgttgttgtgaaacatattttaggggtttcttagaatgtgttctttctttttagagatgtcaggtagttgaaaaatacaggttaaatatgaggtaagaggaaaaaatatccatagtccctactagacaccagcctggggaatccactgctttctgggatgaaactttataaacccacagcaggagggtgaccctggagaccagggtattttctggggaccttcccctagcttttgcatgtttaccttacagtgatgggcttgcaaaagatgctattgtatgaaccaagaaaaaggcaggagactcctatatagaacatatgctcttctggtcacgctgataagcccattgtaaatggacagtattattaaataaaaaatgcagcacaccttacatagctaccttaagtgctaggatgggaatatttgtgtatgaaaatgcatggagttaaaagattcaacttggcatatattaactaactgcattccagctgacgtgttagatagatattggtctgcaaagatggctagtagccatcattcattcactggagcttgcttccttatttccctggtgtattggcatttgtttccaagtcatttattcttggtgtgtgtgtgtgtgtgtgtgtgtgtgtgtgtgtgtgtgtgtgtgtgtccacttgtccctgtgcctgtctgtctgtccatcccttgtactggggattaaacaggtgctcagccatggagctctgttttttttttttttaagattttatttacttattatgtatacaacattctgcttccatgtatatctgtacaccagaagagggcaccagatctcataacggatggttgtgagccaccatgtggttgctgggaattgaactcaagacctctggaagagcaggcagtgctcttaacctctgagccatctctccagccccagtcctgactcttgtagacaggttctgttctcagttgagccctgggtggtgagagtaggggagtctgagaaagaacactcacgagatgtagggtgtaacgataactctttccgccatctgctcaagccctgctgccacgtgggcgcccaaaatacacagagattaacattaggcacaatgccgctggccaatgactaggattccttacttactacttcagtcttaattatcaatcataattattaatctatatattttacaaagacttatcaaggacacagggtgctgggtctgccctttgagtctaagtcagagcagagtcagggtcttttcaaacttttaatgaggggcagtagtatattgctcttctcatctgtttcggattctcctattccagtggttctcaaaccttcccagtgctgtgatcctttaatacagttccccatgttgtgatcccaaccataaaatcatagctgcaattttactactgttatgaattgtatagtaaatatctgataggagacctcaacagggtcgtgaccctcagatggagaacctttatcttcttcctcaggctgggggagttggattttctataatgttagtggttgaacccaggattgaactatactctcagtcctaaccaatttaaatgttctctttcaaagatctaaatatgctggttatgatggcacactcctttaatctcagcacttgggaagcagaggcaggtggatctctgagtttgaggccagcctcgtctacaaggaaattccagaacagccagggcaacacagaggaatgtcttgaaaaaccgaaagaccgatgcctaggctaatagtcaggtgtcttcaaccttcagacgttgggcacaatgctgtcatctacagactcctcagtggagaagtgtacagttgagttgagttacacaaataactttacagtggttttatgttgggtgttgatagctatcctgtggatcatgtgccctgcaggttgtaggataggcaactgcaagtggaaggacagacagaaaccacctctgtagaggaggttgtcgtgacctgcagctggcatgggtggcactggtgcacacctcctggatgaggacgtgtccatgcatgagtgcatgtatgtgcagcttccctgacccagcccagcccagtccagctgttccttctgcctaagcctgctgggctacctttctgagattgtaaagggaaggagcctacatttgagcgggagctgtatatagtttggtcctagctttgccacagattgatcttattgaaatgcttgccttgactggatctcagacaaaatgatctctctctccccccacaggctgagaactaacagagcaaatgccattgatttgactaaatggttaaactccagatttgttcatggcaggagccgcgtcttcagttgtgtttgtgttttctatgttgtactagccatcattaggcataaagctttctggttttgttcagttgattttcagacagaaattactggctcagagagtgaggagacatctttatgctatgctccattcccactgtacgttcagaaccataacaatttgcagaactgttggctttttgtgacatagcattttaaccaaactgatctaatgcttgtttattatttttgtcatttagttggtgtgaagtggtactgcaatggtgctttataataattagagccagcagggtttttttttttttccggtgtgctagcctctttgctaatacgctaggctactctgtatgttagcacatttcctcctcacagtgaacctagcagggaagctaagccactcacctctgtctgtgagcgaccgtttgaccccagaaagcattcttcctttgggagcctatccatactttgatttttgcaacagatgtggttaccagagaatttaaactgtttgtgtgcttccttcctgtctgcattgtggggtgtgtgaactttggcattttcttagaaaactgaatgtgctcctgggagaagttgctattagctttcttacaaaggaggcagcagcagaggtgcatggagcacatttgggggaagggctcggtgtcctctcaccacacaccgtgccagacatgctcaagtctcccttctccctgcagcggccctgcaggctttgaaacggaagaagcgatatgagaagcagctggcgcagatcgacggcaccctgtcaaccatcgagttccagcgggaggccctggagaacgccaacaccaacacagaggtgctcaagaacatgggctacgctgccaaggccatgaaggctgcccacgacaacatgtgcgtgccgctgctggggggaggactctggagggagggtgctgctgaggccacggcctcattgtggtcggctccctctttgtagcttctgagggaactgtggcctgctgcctttgtttctacgagagctcaggggtggaaagagaaattgtttttcctggttctagattattgtgacaggcttagttccaagttggatagtccttagaagaaggtcttctcagtcaccgatgttcatcagactgtcacagagatggtggcagcctatgctgatcgagggtgggattgggccatagcatgtgtgctttcccccagggctttgagtctgttcttaagtccgctttgggggacctttttgtcccggctgccctctgcttctgttctcagcagtccttccttccctgtggatgcttctatgccagtggcctgagaactacacactcaccttggctccagctgtaaagaacaagggtctttccatgaaaaaaccctgtatttattttagttctttgatgcttcagctggccctgaggggtacttggagcatttgctgctttggccacctatggccttcgatgtatagcagccatgtccttcatttgcatactgtctggagctgctcagtctttataaataacattaaaatatttatcagtgggctggggaaatttgctactctttgctctagagacaagcggtgcggaagcattgcctgacatacatgaggtgtgggagtgcactgtcaggcgaaggctgcatcctttaacatttagaacaacagatagtaagtagtgtgtatgttgtgaagtacacagaccatcttgaatatctgtgtgacacacagtgtttaaaacacaggcatttacctttcctttgggacttcatagatgtttaagtagggaagggcctggctcagttttgtggtttatgattttttgtttggttttgtttttcgagagggtttctctgtattgttttggaggctgtcctggagtggtttgtgatttttaccacctcctgtttagagttgctttggggcttgaagaagacttggtcttggcactagagttaaagtcctgtggtctcaaatctgtttacagatctggggtagaggtggagggtccttgactccacccgatgctaagcctactttccttcagtgctggactaaatgatgtctaaggacttccatcttcgtgattctgtgatttccaattttacatttattttgagtgtgtgtgcccctgcctgtgtggatgtaggggtcagaggacaactttggggagtcagttctttccttccacctttatgtgggttctggggcaaagtactctggtcaccagctcatgattcccagttctgaagggaaggaagaaggcaatgattacaggcagtttcctaaaggagagttactgggtgctaagaagcagagggtatgtgcagggcttctgttcagaccagtcttagctaaagtgataacctgttcatttcatttcaagggacattgataaagtggatgagttaatgcaggacattgctgaccagcaagaacttgcagaggagatttccacagctatttccaaacctgtaggctttggggaagagtttgacgaggtgagtggtttcttgaagatcacatgggtctcataggtgacaagcctcaggctcaacatagtgtgtcaactccagatgtcaacaggcatagtgtgtacctccttggattctgaatttttttttttaatttttaatattattttgtgcttgccatagtggcatgtgcctttaatcccattattcaaaaggcagaagctaacctggtctacatagagttttccaggacagccagtggcagtgagacccagtttcaaaaaagaagaaaaagagaacataattttgattttttgctttaagggtattttgcctgcccatgtatgtctatctgcgcactacttgcatgccttgctcccctggaggccagaaagagggtgtaagcactcacttggcagctagcaactgtctgtaactccaagtccttctgttggggtactgtatgcacatggtgcacagacagagatgtgggcaaagcacccgtatacgtaatataaaatctcagaacaacggcaacaaagaggatggtgctgggttgatggtgcaggcttgtaacccagcagctcaggagtttggagcaggagaacaagcagcctggaccacaggaagtgtaaggctggcttgggcaacagccagaaaccatctcaaaactttaaaaaggaagaaaaagagtctgggtatgtagctccgtggtagagcacttgcctagcatatgcgcggtcctggtccaggtcccagtatttccccctgcaaagacgtgaaaagatacagcccctccacccaagaagctcgtagcagggaccccagatgcatacatatgccagtggcctcctcagaaggttcaccgggcatcaggaggaggaatggctgcagggagggtttcaccacacttccttttgcaggatgagctcttggcagagttggaggaactcgaacaggaggagctagacaagaatttgctggacatcagtgggcccgaaacagttccactaccaaatgtcccctctgtagccctaccatccaaacctggtgagtctgcccacagttgggacacaccctggcaccatgagaagggggtgatcgcatggtcagttgacttcggtttgggttctgagccaaagaggatctgttgtgatgatcacgatgccaatgtcatttgcagaacagatttcgaacctcagcactgctgacatggccagataattccaaggcttgcagtggggctgtcttataggatagccctgacttctctccaccagatgagcagccgctgcctatgatgtcttcaggcattgctctgttctagaatgatttttcttatcccctaataagggaaagttctaggcactgtgcagaggtgtgagaacttaagtcttgctccatccaggactctgtgctatgtgctctctggaatgaaccagctctggctggtttggagacctgctttgtaaaaccatcatttccttgcctgcattttctccctcttctcccacgtgctccacacagagtttctagagagacaaaactgcccatctggagtggagacaagggcctgctagcagggtgtgaacagggtgtgaccctgtccctctgccatggtaaagagaggcccctcaccaatcagtgactaacagaggcagccttgcaaagcatggctccagcgactccaaatggagtcgacttggcaaggattgcatctcttgggagggatggtcttgcttctcccccaaccctgagtgcttcaggagtaagggacccccagtgtaaaacaggccctcctggtatggctgcccctgctgagggctgaggggagttgtggtggaaggtgtgcctggtttcctgaatttgcgtggcagcttgtgggcccaaagagcagtatgctgtaggcctcagctggctgcaggacagggctgtgtgcttacacagcggagcacagccctggcttccaggcacccttcaaaaatcaccttttctgtctccacacagtcaagaagaaggaagaagaagacgacgacatgaaggaattggagaactgggccggatccatgtaactggtccagcataggctggggccagacagactctggtggcctgtgcgacgggcaggcgtgtgcgtgcgcagggcaggcaggacgcggtgcaggcagcctccatcgctcagctctcacccaaagcagtaggccgcatcactnnnnnnnnnnnnnnnnnnnnnnnnnnnnnnnnnnnnnnnnnnnnnnnnnnnnnnnnnnnnnnnnnnnnnnnnnnnnnnnnnnnnnnnnnnnnnnnnnnnnnnnnnnnnnnnnnnnnnnnnnnnnnnnnnnnnnnnnnnnnnnnnnnnnnnnnnnnnnnnnnnnnnnnnnnnnnnnnnnnnnnnnnnnnnnctctgctgtttataatgttgaatttctgtaaaataaactgtatttgcaaatccaacattgagcttctggactacgctaactccactgctgaatcctccatggaaagggtcggccgcttgcagttgaaacgatccggaaatgtagcccgtgtcctttaagtcagctgacttgtcgcacatctctgtaagacgtgtatggtactggcagaaaagtcgtttttttaaaagccatagataggcttttcctcgtccttagctgtaatagcacatctgattttggtttcctcaagagctgtgtttctgtctgtcacctgtgtactgccccccacccctgtgtttaccaccctggcccttgtcactcctgctcccctggtctttggagttgtgccacggatctgaaatggatgtattctcttgagaacaaataagattgttagaattaaatcccagctatccagttttctaacatagctctaaggtcctcattgctgtttgtgatgactgatagataactcactgagaacatgtgcatacatttatattcagatgaaattatggtttgcactgtctattaaatatctcgatttaattttcacacttgctgttgtgttcagtcaatctctcccctcccttgggaaccgaccctctcccgtccagctctggtccagggtcactggggaaacatgaaggacttttgaagagcagcttccttcttcctacaaacttccagcttctggaggccactgagctgtggccactacttaacctggggacctctgggtctatacttagtgagttgattcttgtgcagccccagaatcttccatccttgcctgtcaacacctagggaagtgcctctgggagcctctgcctggtggaaaccacggtgccaccatgatacaaggcccagccaggcagcgtgtttcatagtagggaagtgtattgggtagggactgaggactgagggcacaaatgctcctttggggtctgcccagtctgtttctctttggcccaacacttccattctgcactttattcttgtgccctctttagaaactgatggatgctttggacccttgtatccagctaagtagatctccacatacgtttgtccctcctgcatgtctcaggattgagtagtcacccccatccccctagcttcttttttttgttgggggggagaggttttgagacagggtttctctgtggctttggaggctgtcctagaactagctcttgtagaccaggctggtctcgaactcacagagatccacctgcttctgcctcccaagtgttgggattaaagatgtgtgccaccaacacctggccccccttagcctcttaaggttaaaagcaatctgagttcacagtgggatattgtcatgctggcagtatccccagagcaagctgcctatgttcctgtctttcacactgttctgtttgctgcgaagagacacatggcaacttttaaacgtttgctggggccttgcttacagtttcatagtgggagtccatgaccattgtggcactgtgctggagccgtagctgagagctcacatctttgcaagttgaaagcagagagagactgagcatggcaagggctttggaaacctcagagcccacccccaggggcacacctcctccaaggccacacctcctaatccttcccaaaacagttccaccaactagggaccaagcactcaaacacaggagttgatgggggcccctctcattcaaaccccacagctccctgggtctcatattctcctttgcttgtgggaagctgttcatgccctgctccgtatcccccatgactgctacactcaaaattgggacttgatgatggggttgaaaattcctggcttgggagagatggggcttggctgatgtcacaagttatgtacacctcatgaagaatttagtggtagcactcgctggcatccttctgtttgcttctaggcaccctttggtgtgagattgccggagtggcctgtcttgagtcttaccagctgccttgcactctctccctaggactgagtgagtagagctgccagatccccctcagctctgacaggcaaagagatcaatccaggccagtatcacacaccttgaacctgggactgtggggcacagggctcaccagtgcccagacccttttctgtccttaggaaggtctcagaccttgtgagacataactatgtctcacatagccgttttctttggatacaagcaacagaagactcaaccaacacatagacacgacactcacttattctaaatttattcaggtattttttgatcacctactatgagcaggcactgagaatacatgcaacagagtccatgcccttgtgctgtttgcaggctggtctccgagggacaggacatctcagccgcagtgctggggttctgggtttgaagtggtgctcagcaaccttctcaagagcaaagctcttgctggtgtgatggtacacagctaattccagcaccaaggaggctgatgttggaaggatcacaattcaaggctaacttgtatgtagtagtgagactgtctcaaaatacaaccagccaagatgtggtgtactcaggagacagagacaggagaatccctatgaattcaaggccatcctgatctatataggtagttccaggacagccagggcttcgtagagagacccactctgttgataaacaacaagagttggggagatagttcagtggttaagagcacttgcttcgtgtgctgggcattggtggcactcccagcacttgggaggcagaggcagaaggatctgtgtgagttcgaggccaacctggtatccagagtgagtgccaggataggctccaaagctacacagagaaaccctgtctcgaaaaaccagaggacccaggtttgatccccagcacccacatggcagatcacaactgtctgttactccagttccatacagacatacatgcaagcagaacaccagtacacataaataaaaataaaaatcaacaaaaatgcttcctgctctgcctaggcacatgggccttttccttaggctactactatgtctcctgggccatgactattacatggctgaaaatggaggtttctgttccacccacagctgctgtgctccaaataaacacatggacactgtattaattataaaactgttggccatgggctggagagatggttcagaggttaagggcactggctgctcttccagaggtcttgagttcaattcccagcaaccatatggtggctcacaaccatctgtaatgaaatctggtgccctcttctggtgtgcaggcatacgtggaggcagaatgttgtatatataataaagaaataaaatcttaaaaaaaattgttggccaatggctagggcttcttattggctagctctgtcttaattattaacccataactactaatctatgtatttctacatagccttatcttaccagagagccatgtcctatcttcccagtttctacatggcatccctcctgcaacttccctctgctttccttttcccagccttctcctggtctggtcaccccgcctatgctacctgcctgactattggccaaacagtgttttttgttcatcaaccaataagagaagcatacatgcagaaggacatccccatcagatggctggttccagagtctactaggattccccttaaggctggagatgggctctccggtcccagagtgttttaccgtctgccccttcagagcctagagaagctggggcaaagtggcgcacatcttttatctcagccctaggaggcagagacaggcagatttctgagttcaaggtcaacctgcctcatctgtgtagacaaaacttggcttctgttaccaggaggaagcagctcattgccaagcaggcaaccagaaattcggacaccaaaaatcagccacatggctaatatggatttaaaatgttttaatggttattttatgtgtatgagcgttttgcttacgcgtgtaccaggtgcctgagaagggcaaaggagagtgtcagattcccaagaactgaagttagagaaggttgtgggctacaagtgggtgctgggaatcaaacctgggtcctctggaagagcagccaatgctgccttctcagcccctaaaagcagatggagtcaagacacttttgcaaatctctcaatccctccagattccagttcttaagagccccagaatagctgagtatttaatcttaggaggcagaggtggtgggatctgtcagttggaggccagaccacccttgtctatagggttccaggccaaccagggctacagactgagaacctgtcaaaaacaaaaccccagaacagggtgggggatctgagacttcagtttagcaaagttcttggtaactatcgggacctgtacttaactccagaaggcttaaatcctcaggaaagcatatgtggtcactttgtgacctggctccatgctcatcttccagctactgttacccacaattcctggaatgggagttctagtagcccttgggccttgcctcccactcctggacacagccctcttctctccctctcccctctctcaggtgtgtgtgagtaccttgctcactataagcccaaccctacaaatacatttttttgtttgttttgttttttgagacagggtttcattgtgtagccctggctgtcctggaactcactctgtagatcaggctggcctcgaactcaagagatctgcctgcctctgcctctcaaatactaggatcaaaggcaagcaccaccactgccggcatacaaatgaattttgagtgtctgccctctctaatgaaattctggtttggtaggaaattgaggaaggtagctgccatcactcctttctcatcgcctccaggctctgagtaattgatgtgaaacacatgggaaagaacccaccccctcaggagtgctgatgggaaggagcagagggggaggggagtgaggaggactaggggtggggaaggagaagacaggaaactccaccttgaagcatgagcagggtcaatggctgccccgcttctaagtgatggcagagtcaatagacctgcagtaaatatttatgaatgaattacagatgaggaaactgaggcaccagggtgtttcaaaccttagccagccctaaaacatggtctcagcgcccttcttcccatccagacttcattcaatatgtcttatgtatccatctaacaaaaacagcttccttcctgcctgccaagttgcatcctggccttgctggttcctttctcagcagaagtgtgttctctggctcagagcgccacaggccagaacgattcagttttcagtaggaacagcagctccacggggcatcaaactcagaaaacacagagccatcatttcattcaacctccacagagcatctcagaactatttgcctgttttacagctctgcaagcccaggcacaacagggttaagatttgcctaaggtcatagggcatttcctgtcaccatagtgaggcaggggcagattcacagaggcatgttcctgtttcagaaggtgccaatcctgaatgtgatcaaatgctggggtctaaagatccagaaatgagggctgccactctcatttttgcttcctgctggagccaaaaatcttataagcaacaaaagccagaatcatctagaagacacgaaatggagcaatgggatcagagccatgcaataatagttggtctcctgtgtccttctataatgactgataagatggggaccctaagactgggcccctcctccaacctgagaccttttctcttatccccagacactaatctgtctttcttcctccctctctttaacttggccatttggggacacttggttccttcacagaaagagtggacaaagctaccaaggtgtatgtgtgtgtgttacacacgttaccaagtcatagttgccatggttcatgattcatgtatggaggtcaggacaactttgtgtgttgatcattgccttccatgctgtttgagagagtatttttgttggtccctgttgcatgcaggctagctgacccatgaacttttgggggttctcctatctcagcttcccatctcggtgtagtaccatgcctacttttttaataaaaaaatttatttattatgtatacagtgttctacttgcacatttgcctgcacatcagaagagggaagagggcaccagatctcattacagatggttgtgagccaccatgtggttggtgggaattgaactcatgacctcgggaagagcagccagtgctcttatagcctctgagccatctttccaacccccccccccccgtgtctaccttttatgtgggttctgggggttcaaatccaggtttnnnnnnnnnnnnnnnnnnnnnnnnnnnnnnnnnnnnnnnnnnnnnnnnnnnnnnnnnnnnnnnnnnnnnnnnnnnnnnnnnnnnnnnnnnnnnnnnnnnnnnnnnnnnnnnnnnnnnnnnnnnnnnnnnnnnnnnnnnnnnnnnnnnnnnnnnnnnnnnnnnnnnnnnnnnnnnnnnnnnnnnnnnnnnnnnnnnnnnnnnnnnnnnnnnnnnnnnnnnnnnnnnnnnnnnnnnnnnnnnnnnnnnnnnnnnnnnnnnnnnnnnnnnnnnnnnnnnnnnnnnnnnnnnnnnnnnnnnnnnnnnnnnnnnnnnnnnnnnnnnnnnnnnnnnnnnnnnnnnnnnnnnnnnnnnttggtttgtgtgtgtgtgtgtgtgtgtgtgtgtgtgtgtgtgtgtttgttgtgcctggctctggaacccatggtcttgccatgctaggcaaatattctaccactgagctacactcccagctttttacatagtgttcagtaagttgcaagtatgaattaattcatctggtctctgaacctgtatcaaaagattatttttgaatagctgctatattctgtatttataaattctatatacactgctgtgctagattgtatagcaatatacatgtaactgcctgaagtttttaaaaggcagacacataagaaacacgtataataaagacttgtagcactcttcctacactccaaaggaataaaaggatttacctctaaagtctgcccccccccagtcatttcttttctccatggaaacttctgcacttgcctccctttgtcttgtcttcctgctgttcaccttgtccaccacgctcaaacatggtggcttttacctgtaatcccagcacttgggaggaagatgcctggggattgtaattttcaggccagcacggataactcaacaagatcttctcttttaaaagagaaaaaagagcggggcagtggtggtgcacacctttaatcctagcactcaggaggcagaggcaggtggatctcagtgagtttgaggccagcctgatctacagcctgaggtccatgacaggttccaaagttacagagaaaccatttctcggtgtgtgtgtgtgtgtgtgtgtgtgtgtgtgtgtgtgtgtgtgtgtgtgattttccccctaaaacatcggttctcaaccttcctaaagcttcaaccctttaatacagtttgtcatgttgtgagatggatgatcccaaccataaaatcatttttattgctatttcgtaactgaaattttgatactgtaatgaattgttatgtaaatatctgtgttctgcgatggtcttaggcgacccctgtgaaagggtcgtttgacacccccccccaaggggttgcgactttgggttgaaaacagctgctctaaaacttccctggaagacacagtttccaggtttcagacagaatctgcctctctctgtctctgtctcttgtttctctttgtctctgtctcttctcctcttacacacacacacacacacacacacttcccaaggccttgttcaaggttaagtcagactcagggctaagcacctccaaggaatatttccaaacttctggatccgcagaccttttgggagtcgctgggaccgagctgtgtgacatggaacagaaaggaagcaggctactccgaggagcagcgtcgggcgtgagggcagcagcgctctaggcggcctgcaggtggcgccatctcccagacagtgaagcaactctgggctcctcccgtgctgaccacagatctctgggtgcgagggccaataggagccggcctcctctcctcgcaccccctagccatgcttcttctgatctcaccctcacaccgtcaccgttgcctgctgtcgcagagatgtccccaacagaggttgatggataagaggaccgcacaggggcgggcaggccattgcaacagtagtaatggtgatcacaatactttccctggctcattttgcaggggtcctccgtggaggcctgggggaggggccgctgaggctacctagaaagttctgccagctacctaatagtgtgagatcctgcctcaaaaaaccaaaacaagcttggttcatgctttgccaggaaactcaggagttcattatcatcctcggatacatagcaagttcaaggtcagcttgggctacatgagacgatgtctcaaaaaaaaaaaaaaaaaaaaaaaaaaaaaaaaaaaaaaaagcaaatcaaacaggggaaacaaaaacgaacaaatgctcacagagaaggactgggatttatctcagtaaagtgcttgcctagcgttaatcaagacttgagttcaagctgtgtaggctcgcgtttaatcccagcacttggaaggcagatctctgtgagttcaaggctagccttgtctacagagagttcagaacagccaggactacatagggaaaccctatcttgaaaaagaaaaaagaaaaagacgtgggttcagtctggtactgcatgaagctgggtttggtggtacacatttataaacccagcacttgggagctggaggcaagaacagacgctcaaggctgtcttcagaatcagcaagtttgagttccaggtctgggatacctaaaaccttgtctcaaaacaatatacaagaaaaaccaaaccaaaacaagagtttaaaggcagtgagtcttaattaaaggtgagtattgcatagcgagggccctgtgtagctgcaaggattgaataactatggcacgtaactggcccagcccaccagcatctttgccagccatgacctccaccccctcctgctgtctgcctgaccctgcacctcggtctccaacagtcagtcaggggagcattgtagcatctagtccaggtcttgtcgcttttccactggacacttgtctttgagagctagggaagagctagggagactgctcattcagaaaagtgtgtgtcatgcatgcctaaagatgaagttcgatccccagcaaccaggtaaaaagtcctgaaacagggcactgaaacaggaagatctttgggctcactcagtcccagatcacacacacacacacacacacacacacacacacacacacacaagccaggactaggcctttcagcttggctcttggctcttctactctgaactttgagaactctccactagtatgtcctctagcctggcttgctcatcactgtagaaactttacattttcttcttcagtgtctatttctcctttcagaccacaagttccatgagagcaacagctgtgatattctcatgccctgtgagtagtcttctactgaactgaactaattaacgaggacagctggacctgggcaggaggctttggtaacagcatcatttagacaaataatatcttcatgacatcaaacagtgtatctgtttagcctgccacagagtcaagggaagggcaggggactgtagctctggctctggattccacacactgcagaactgtgaaaggttgggtgacggttactgttacccaacggtgacagtaaccggtgacggttactgtcatctgaccttagccccactagtgctgggtcaatgatctgctatatgttcctgtaagatagattctcacctcagctatcatgttgctgtaaatccagatggcattcatagctatccccttacccctctgtgtgtgcgtgcccgtgcctacatgtgcagatcattcttggccaccctgggctctggggacagtggccgggctgagtcacacagaggatttggtgtcctgtggagagtttagggctcagtcccatatgtcagacagcttgctatcacactccagttgttatgtgcaactccctttaacggcctctaacctctctttaacaacagccagcatgtactaggccctacctggatgcccagcgtgatgtggagggcattctcaaaagattcttaggggcccttatcatgttcatcattgttcatatgaaaaaatagagtccacgaggaggaatgatcagctcaagatttacagtgtgtggtccagggttcccattcacttgacctgtgcacagtggggcacagaacagctcttaggacaataggggacgcagaaccagtacctgagctgatgctctggcctggtatgtattgcaacagggaacaaccatgtctttcctaggacgcaggatggttaagcaggtcaggctcaggctggcccaagctggagttgcagcagaaagatggcttcctggccttacttcccagccaagccagcagaggacaggcgtcagtgcccatctacctgggttggggtgagtatgtgaggagaaggtagctctgatcctgggtccatctgacaatagagacagagacaaagtcccgtggggactttcctgtccttccctagtggagtccagagcagaccctggtggtgcctgtgctgggcatttctgagctgcaaacaccacctgttgggtcccagcccccacggggtctctgagagttgcttgtcagccaatacccacaggtgcttcctgtgttctagtcctggcttacagccccggcctcaccccactacacctgggaaaacacgagctcttcctccacgagctcttccacctggggtttttccactgtgctgtaagtgtatataaggctgctctctccctggacaacggcagacaaattaagatgcacatagcacgggtggccagacgtctctgcttttaactaaatctccaggctttcgcctgatactcggacttagtcttggcaagacgacacaaccacccactcactcagctcctcattggggagtgactaggtgagtgtggttgggttcaggttctcaccagtctgaggcatcagggtacagtgcaaaggcagttttaggcaggctggaggcatcaggccctttcctgtggagatgaggggctagagctgttttcttaggcctccctagcatcaccacatactggcttaccacagtagtgagtagacacacggcctcacagttcaaactgtcattaaacagagatgtatctctatatggttcaagaaaccttatgtaatctgaagttgaggtggtggtgacctaggttgtgggaagcgggcctcctagggactgtggccactcttggctgtccttggctctagtcccagctctgctgcatactgacatcagtgccattattatcttctcttgtctcttataaagatgcttgtcattggcatcagaggtgacatcccaaatgacgacaccttaaaaccctcaaatctatctgcaaagagcttttatccaggaatgtcacattcacagggtctggtggggacacatgttctggggtatcactcttcacctacccaaggctattacaaaggtgagttcagaggaccccttgaggactgctctggcagcagggacaccctctctgctaactctggaggatacagggcaggcaggccttgggtaaagaggcatgtgtcttgtgcagcaaccctgcacccagcggcctgctctggcaaagcactatcccaaaacatattttactcataaacgggccaattaagaaggcaaatgttttcaaacaggaggatttattggcacagagagtgccatccctctagcacaaggagtgggtgtgtgtgtggagccatctggaggggctatttgtcatttttatttagttacaagttgttggattgttactggcggggttttatgaggtctgagcagggatccctagaggtggggaccacaggctgtgtgcacatgtgtttcagtctgtcagtcatgtacacctaatgtctgagtccatgtgcatgcatgtgtgtccctgtattcctttcttctctgagtgtatacatgtatacctctgtatgaaagagtatgtatgtgtacacaggataatatgttggcctttccatatgttttaatatgcacacatgcatacatatgcccatgtacccatgctgtcacatgcctgcatgcacttttctgtgcctttgcatgtatgtgcctctgtgtttgaaagggtataagtctacagtcgtatgagggcttgcatacatgactagtagatgtgcatgtacacatgtgcacactcttccatgcccagcctggagtatgcttgcatgtcacaccccccgagcacaccgtaccctggcagcagtggacaactcctttatgcccccatccctgtcaccacctctgtgactgtcctttaatctcccttccctgtgtgtccttctcttttgcagtggtttgaatgagaatgaccccataggttcatatatttgaatgctggtagaactgtttgggaaggcttaggaggcgtggccttgttggaggaggtgtgtcactggggccagccttgaaaagcctatggcattcccagttagctttctctgcttcatgattgtggatcgatatgcaaatgaccagctccgagctaatgtgaactgctgctgccatgcccctccccccatgatagccatggactctaatcctctgggaccaagatcccaaaattaaatgcttcctttcataagttgccttggtcatgatgtttgatcacaacaataaagatgtaactacgacatcattttgtctttgtttggaccaggagtccccagtagcaagtctcttgaatgacagaaaagggcctgacctggcctagatttagatcctgtcttggtcttgttttgcctgttacaaggacttgtcttggcaaagaactatgctgtcttgttttgattgaaacaagcaatcgtgtctctctgaggccactctttgttcccagaagctgagtgaggtgtagccatagaaaccccagcatgtgccatggctcctgacacacagcctctgcttgcagggatgatgagtacaggtgcagagcatgtatcctgtcccactggtgaccagccacagatggctactgtggaattttccagcctgtatttcccaaaacaagctcaaagattttgtacaggtcaaattgagtttgtgtagtagggggatcctgggaccacccactgtggcttcccacagccacagttctggcatattgtcaaaaggctacacttcctgtgggtcccaccatcagccctggagactggatttcaagcatcatcttctctccctccgtgagatctagccagccactcagtcctgtttactaggcccccagggtatttctctccagtctttggaactctgtggtggcttactcttgcttccagcttgtggcaaggtccttaaaaactctttgtgtctgtcctgtcacatccaacctcatcaagacctatcccattggtatttaaagctgcagcaaagccgaactacttttactctatctgttgtctcttggcttttcatatgctgctcccatttcaggtaacacctgtccaggcttttccactgcccattactcctcttcatcctttgaagccccaagggaagcacccttgaaagggcagaaactccctattcttaggattttgtaaggttatggtatggagaaggctctcaatcagtgggcacactttctccttgaaccaccagcttcttcagttgctgtggagggcggaccttgggcactcagtggtctgagagattggacagtttgactcaggcaggagcgacctcacagccttccccagcctcggacccagcccacaactctcaaatgacatcagctgcagttcctccagcgtgtggatttttctcaccagaggccatttctcgttaaatcggcattttactgctttccgtgggactgtgttggtcatggagaattctgaattttacagccccctgttgtagagtgtgacattctgggctataaagatataatcagctctcataagagatggtttcttcagcactcaggtggtgggaggttgggtggcggcagcatgattggaacccttaagtatctaaagtgactgttgcaagtcccgggagccacaattcaatcagcctctaaaacatgaaattcaacagagagcggtaaaaagatggcagaggacgaaaatgagaaaagaaaaaacgctcaggctggaattgaattctgacgtcacttgatggaagtgttgaaatgagcagtcacccccaccccctacacacacacacacacacacacacacacacacacacacccacacatatacacaccccacacactctatacacaagctccctatgcacacacccacccacacaccctacacacatccctcccacaccttacacatacacacacacacacacacacacacacaccctacccacacatcctgtatacacacacaccctacacataccccaccacaccctacccacatacaccctacacatacacacaccatacaaacacccacatacccatacatacaccctacacacacaccctacacatacacacaccctacacacacccacatgcacaccgtacacacacacacacacacacacacacacacacacaccatgtgtaccttctccagctctgctgaacagaaccaggattgcttcctgctgttctgaaagaaccactcaaagtttcttctctctctctgtctctctctctgtctgtctctctctctctctctctcttctctctctctccccttcctcaccgccccatccttccttccatgcttcctgagtacccactgtgtgccaggcaccactttagggactggaggtataacactgaacagtcagatgtggtcctgatttttgggggtgggggtgggggtgctggggaacagggtttctctgtgtagccctggctggcctgcaactcactctgtagagcaagctgggcttgaactctcagagaactgccttcctctgcttccctagtgctgggattacaaatgtgtgccaccatgcctgctctccccagtctcagctttcctcactgttaggcaccagagctgcttcctgcattggtccgacaattcatttttcttgtgaccagcatgaagtgtgacaatgaagtagtgactgaggccaagcaaatgcatcatatcccagttttgtttgtttttgtttttcgaggcagggtttctctgtgtaacagtcctggctgtcctggaactcactttgtagaccaggctggcctcgaactcactgagatccgcctgcctctgcctctgatgtgctgggaccaaaggtgtgcacccccagcttcacatcccagttctaaagagcacagtttaattgggcccagacacaccctacaaaatttccaaaccgcagagccacacttcctgctctccaaccactctgctggctgagcttccttccttgaccccatcaacataaaacagcaagagacagtgagaattattgagtcataactccttcgagggagccatttgctatccatctttttggggagggtggtcttcaaagggaccacttacagagatagagatgcctaggaggacaagggggtctcgtgcaatgtgggtagtctgcttaggcagttgcctggcctctgccctctgactggacagaagatatgggcgggcagcagggaagtgtagtcaagcagaccctggaggagactgattgaggccacgtgctggaacaagggatcaggggcatcagtaggggtgtgggaacttagcaatgagtccccagcacaaagtagttgctcattacgtgtgtgtgtgtgtgtgtgtgtgtgtgtgtgtgtgtgtgtgtgtgcacgtacgcgcgcccgcgcatgcttgcttgtgaattttcacatgcatgggagacaggacaactttgggtgtcttccacaggagccaccaagaacatgggaggcagcctctgctgcgtaccgagtaccaggccagcaaggcctaaatcaaggtggagaagacagacctgggaagcaggggccagacttgaacaaggtgacaaaggcagaatttctgggactttgcctcacttaacatggactggtagaggcaggaaggggcaggagcagctgtggttggtgtcagacccagtgagaggtgagacatcagggaacaatctagaagctgcagacccagttgtggtagaatattttttttaaggtgtgtgacttttgtttatgctgcatttgtttaactatgtgaagctgtgattctttgcctgtctaaaacacccgatgctctaataaagagttgaagggctaatagcaaggcaggaacaaggataggcagggctgccaggcagagagaattaaatagaaggagagacaaggaaggtgtaaggagagaacaaggagaggagggtgtcaggggccagtcataaagaaggaaagtaagatgatgcagaagcaagagagataaaagcccagagaggaaagatgggttaatttagggtaagaaaagctgcctagaaataagtcaagctaaggctgggcattcataactaatcagattccctgtgtgatttatttgggagctgggtggcaggcccctcaaaagaccccaaaagagccaaagagtaaaaaacaacctccaacactcagtggtctggagagactgggctgctgaaacagcatggtggtctgggaaggagccaccatggctgtgtcagggggcagaagctctgaagaagtagagcaaggagacacggaagctgttagtggacagaagtcctggaggaatgggactttattttagcttaggccctctgacccgttcattgtcatcataattaaagctatccatgtttacctgaaaataaatagaatttggagctggaaagatggcacaggggaaacttgtgcaaatgtggagacctgaattctctctccagagtccaggtaaaggcagcaggagaaaatgacaccacaaagttgtcctcttacccaacatgtatgacgtggcatttgcagccccctaaataatgataaataaaatggaaatagaattaaacatttaaatctttttttttgtttttttgagacagggtttctctgtgtagctttggagcctatcctggcactcgctctggagaccaggctggcctcgaactcacagagatccacctgcctctgcctctgcctcccgagtgctgggattaaaggcatgtgccaccaatgcctggcccatggcaactcttataaaggaaaaacatttaattgggggctagcttacagtgtcagaggttcagtccattatcatcacggtaggacatggtggcgtgcaggcagataccgtgcttcagaagtagctgagagctctacatcttgcaggcagcaggaagtgatctgagacactgggtggtatcttgagcatatgagacctcaaagcctgactctacagtgacacacttcctcccaacaggaccacacccactccacaagcccataccttctaatagtgccacttcctttaagaacctatttctgggctggagagatggctcagaggtcaagagcaccgactgctcttccagaggtcctgagttcaattcccagcaaccacatggtggctcacagccatccgttatgagatctggttccttcttctggtgtgcagatatacatggaagcagaatgttgtatacataataaataaataaaatcttaaaaaaaaagaacctattttcttccaaaccaccataagtagtcaccctaaagggttgtgcagctgcccctaacttacagaggtgggaactgaggttggggagatgaattgcgttagctgtgaggcagatgtgggactgagatggtcaaatgcacacctgccacgttccaaagcccaggctcttgttcagtttcacagctgagaacaatgaccaagtttgggtgatattagagggtcctgagagggtctagacctcttgttccaatttgcagaagcaggagctggtcccagggctcctggcccagccaggtcatcccagggaggagatgtataaggaagatgtcagcgcaaggggccaagtccgtgctctgcttaccctgagctgcacacagtactcccctttatctcccctccaggctcccacaccccacctggcagctgggagcctaaaactgttgctcagaactggtggccaaacccagccaccagcaaggggctgagctctgcaccgaagaatcatgtccttcatcttgtcccctgcattttacaccaccatgtaaaaatttccattaattcctcagaataaaatgtagtggctgttaattttcaacgcctgggaagtagccagctgaatgccttttttatgcctgaaactattttccactattaggaaagtgtaataaaaagttgcctttccttgattttattttttaattaagtgggaagtcctgggcagccctgctgctggcgctgtggcctgcagcctgcagactaaggaagtagcagagaaaggacacaagccagttcaccttcccaacactgtttccacagccaggccccaaccctcagagccagccagcagcgctggcctggcccagatcataaagaaccctgaatcctttttgtgttccaaggctgtattaggtagtgtgtgtttgagtgagggtgtgtgtacatgtgaaggtcagaggccagccatgggtgtactttctcaagataccatttgtaatggctaaagaaactccagttggtgctaggcatccatctgggtacctgatagccatttgtctctaattcaagttcctggaggtaagttccaggcaaccctgacgccttggcttccacccaggaatgtacagttgtgacatggacagttgttatgacaaaacctggttttggtttctgtaacttatgcagacattcaaggactattcaaggtcagaggtcactttgaccctctaatactggcaaagcagaacagctcttgtggttttcacctttaaaatcccttcctgctcctgcatgacacatctctgatttgtgctagagactgtggccctgctagaagtttttaataaatctggctaattataatctgaattgagtcttgtattccccccctccggtggtctcgaactccataacacactcaacttgctttttgagtcaggtttctcactggcctataacttgctgacttggccaggctggctggtcagagagcctcagggatctcttcattttgtccttccaagtttgggattataaactcatatcaccagggctggagaaatagctccacacttagcacttgctgcttgctctccccgaggactctctttggttcccaagacccacaccaggcaattcacagctgtaactccatatccaagggacccaattgttgtggaatatttaactgtgtaaagatgtgctatatttgtttatgctggggaatattactttatgtgaaagtgtgttacatttgtttctgctaacatttgtttttgttacatttgtttctgttaacaatgaaaagatgtgttatatttgtttgtgttgtatttgtttaattatgaaaagatgaattccatttgtttcatcttgcctgcctaaggcatgtgattgatttaagataaaagctgaatggccagtacctaggcaggagatggataggcagggctgacaggcaaagaaaattaggaggagaaatttcagctggagaaagaaggagaaaagaacaagggagaaagagagggacatgtctggggccagaagccaggtggccaccagccagccagacacgggaagcagtgaaagttacaagtgaaagtaagatacactgagaaaagaaaggtaaaacgccccaggcaaaacttagatgaagagaaacagggtaagttctaagagatagtggggcaagcataaggctgagcattcataactagtaagtctctgggtcatgatttgggagctggttggtggcccaaaagaaagcctgttatattcagtgccctcttctggcttctgtgggtaccctagcccagcatccgcacacaggcacacacagagaataataaaaataaatcagggtggagaacaaacagttaagagcacatactagtcttgcacaggaccccatgtcgtacagctcacaaccacctctaactccagctctagggagatcctatgcttctgacctctgtgtgtggctgctctcccgtgtctgcatacacacacacacacacacacacacacacacacacacacacacagagcttaaaacaataaaaaattaatctttaaaaaatgtcataggtttgctgagtgttgtggcattccaaggagaggctctgagagttccaggacagccaaggctatgtaaagagaccctgtctgtctcaaaaaacaaatcaaaacaaacaaacaaaaaacaccactaccacaacgacaaaaaacaaaacacaaaacctccaaaacaaaaccaaccaaacaaacaaacaaacaaaaaatccacaaaaacaataggaggctggagtgacagctcagcagttaagagctctgactgctcttctggagaatctgggttcaacctccagggagtctcagagccacttgtagctctagtcccagggatccagtgccctcttctggcctctgcaggcactgcacacagttggtacacaggtatacatgcagacaaaatacatataaaaataaaggttaaaaaatattcaaaataaaataatcataaaaaataaatctaaaccgggtgttggtgatgtacctcattaatcccagcactcagttggcagaggcaggcagatctctgagttcaagtccagcctggtctacagagtaaaaccctggctacacagagaaaccctgtctcaaaacaaaacaacaaaaaaccaaataaacagaaaacaaaacaaaaaggcaaaaatgtacgctagaatgagcacctaaacaaaaagacagcagcaacaacaaaaattattttactaactaaatcatctccccagctccagagcctcaaacctttgaacaagttctctctactgggctggagagatggctcagtggttaagagcactagctgttcttccagaggacccaggttcaattcccagcattcacatggcagcttacaactgtctgtaattgcagttccagggtaccgacaccttcatacagatatatatgaaggcataacaccaatgttataataataaagaaagaaagaagttctctctgctctctgggcctcttgattgcctcatctctgagcatcccaggattgttaatcaatgcactgaatgagtaaaggaatatggtgtctggtcctcagtagccatcaggaacaatgaagacaagggatgttagcataaagggggtcttttttttttttttttttgagacagggtttctctgtgtagctttggagcctatcctggcacttgctctggagaccaggctggcctcgaattcacagagatccgactgcttctgcctcccgggtgctgggataaaaggcgtgcgccaccaatgcctggccataaaggggttctttaagctagtctggggtgacaagcagacagaagggatgtgccaggtgaaggctgaactggatgagatttaccggaccttgtcatggaaagaggacagaagagcagagtctgatggccgtcagtcacagtgcccagtgaccatttgtggatgaggttagtgtcaatagttggtgacactaaaggaggacacccttggtgatatgggatcactctttcctactgagcctgactcatacatggaaggaagatggaaggcaggggactctggtggtctgtgtccctgcgttcttgttctgatgaatttctgtgtggtgggcatgtccagtgagtgcccttgggtcatgtgggccatatcacccaggtggagattttatttgccaagggtttcatccagcgtctaccagggaagacactccccactaactagagtgtccacctagagggggatctcagagttcagggcttctggcttcttcctgttcccttacctctgcctccagtctgggaccctggtcagctatctctttcataaaggggatcggctattcttgtcaggacatgcacgtttcaaggtttatgaaagtcacatctgtgccagtgtgaccttgtttcctggaaatccccaggccacggtgcagcacaccattaagtgacacaaagtgttagccctgctatcattaacctcacatctttgacacaaaccactgtcacagccctgctgcctcagagctcaccctccactctttcccctctttccaatgtgctgtatgactctaggtttctacagtcaaacccaaggagctgaagacggagctgagtggtagatggtaaagctgtggcctccatttgctcatgtgcctgcccttcgagggctcctagctatgttggaagaaactccctttatttttctagaatggcaacactcatctctgaatgtctctgctattatttttattgatctctctaggtttctttatggccagaaataaggaatccaatttgattagggactgatttggcctccaaggtaagaagcatcaatacaacagctgagaatcaagcagatgccaatttggttagagttgattagacgcatttagggtggtaccatggcccacccatgcctttcaaccatcccttccagctgtcagctgccccgtcccttccctgctgactcccagtggggactagtaaaaagagaaacacaaggttctgccaagtttgggagcaatttacctgtggtgtcaacccagacactcccatcctctaggggggtgtgaagagatgtttatatgctaattttggagtcataccaacttgagttcaggtctttccacaaagcccccaggaaaggtcatttaccttctaagcctctattccctcatctgttaaattcgtaaaattatttggaaaccctaggggctggggaatccacctcagttggtagaatgcttatctagctcactttaacccaaataccaactctgagcctttaatcccaggtaggcagaggcaggcagatctctgagttccaagccagcctggtctacagagtgaggtccaggacagccagggccacacaaataaaccctgtctggaaccctcactgcctcccatacagagtcacctctgccttccagagccctgaaaccaatgtcccgtgtcttccaacagcctgctgcttcctttgtggctcaactatttcatagagtcccacagccctaattctacaaaacaacaatggacagaaactgacttagaactaccagtgtctaccattttacagctcactcatcactgttaaaaaaaaaatgttgccatttttaaaattgttaattggttattgattaaccaatgagtttgctggctggctttggtcaggtgatcatttctagccttacatctctggtctcattcccacctcaacactttggctgcaacctcgtgtacttcttacctgatctcctgatccatgctacagaggggctgggcaggggctgtcagccccatccacccaggtttgattcattttggcccagggaacaatggttggtggatgcagctcaggcaacagaggagatgtctactattcatcccttgtttaattttaaagacttttgtaaagctctctctctctctctctctctctctttctctctctctctctctttctgtgtgtgtgtgtgtgtgtgtgtgtaccaagcaggcaaggtcttgttttgtattcttagctggcctggaacgtactatgtagaccgagatagccttgaatgcacagagttctgactgtactgcccctcctcttgaatgctgggattaagggcatttaccaacactctggaattattttttatttttaattatgtgtatttgtatgagggtgtggcatgtgccttgaagtacctgtgggggtcagaggaaggcaccagatctcctggagctggagttacaatcacttgtgagcagccagactgtgggtgctggagaccaaactccagtcctttggaagagctgcaagcactgctgttcccatcattcattccttttggatgtctgtctaggaatggagctgttagatggtaaggcaggtgcacactcgtcacctatatattcttttacctctttatactattgttgttcaaggctagcctctgagctcaacttctaccatcttcaggcctgctcaaaaagatcctcacaactaggcctgttgactgcttatctcccccagatggtgggagtatccacccatcccttataattcatcctaatgtcacatgtcttcaggcaggggctagaggatttacttgaaaaaggatgagcggaggggggttgatccctactgtgtgctgacctccaagaatggctactctaaggtcacctatgctcctacacataactcctcacacagtgctctgtaaataaggctagtgacatcattggttctcccagggtgggattgaagcttagtttatacttgggaccttctgagaaaggtagacattgtttttctctccctagtgaaggcattttagtaacaagtgtttttctctctccctagactctaagttctccaaaggtaggaacaaacctgttgttcacagttatactccctgcatattcatagcatattacctggaacatagtaggtgctcaataagtattttttgaggggtgggaatgtaattcagtggtagaccacttgctctgtgtgcacaatacactgggttccatcccaagtgtgtgtgtgtgtgtgtgtgtgtgtgtgtgtgtgtgtgtgtgtgtgtgtgtgtgttggagcacattgaaaaaaaaaatgcaagaacaaacccaagctgctttcagttcaaagagagttgtgacaactccaggacaagacccaggacctcccacagcccccctgccctatctactgagacaaaagcccagctgactcataaagagccagcagttcaagggctgcttgatttcagcatccccttgttctttgaagaaagagcatccccctctccctctcttggtctgcattgtcacagcttgaaatattcttttgattatgagaacatttcccattaagtgtgtgattccagctcctccccacccccaccccccagtatttatgaccccataactccagggtctgtcacaactggttctgcaaaagtgtatctgagtgtaatgaaataattccatgaaaatcatggtgagaggctgtcgggttcccccgccttatgagcaagccatcaggggatggggtatataaatcacagcctcccttaattaagtaaaacattttaaggaaaaaaaaccaaattaattaccacttcatggcaccaccccagcagattacgcaaatggttcacattccataaaccctgactgaatttagaactaattgttgctctttgggtttgtttatgctttcccacacactgaagatctgtttccaaagtggtagttcgggaaggctcctccatccaaaatgatgtaagttgtcataaaatcaagaatcatggttttctttttcttttttttttttaaattgttgttgtgttatgcaagctgaaaacacaggctgtgtgagcatgtaattgaagtatccacacctttggtgtggggccttggcttggccaagttcctgagtgctgtgtgagtttgaacaggaaccgggtgtctctgttcttttccagtcactggtaatgcacaggtcactatgcaggcagcctctgggctgctccaacaggaggtgatggtcacctctcaacttcctacagtctaatcctgatggcccgttttttttttttttttttttttttttttttttttttttttttaatgagttagggattgaactcagggcttcctgaattctggacaagccctctgctgcatgcccagccctatagcaatcattcttgaactctttttttcaagctaaattttaaaaatagatggctctagtgactcctggatgttggtatctagtttggcagtgtggtgttctaagaagtagccaaatgccaagatatctgagtgtaatactgtcattgagttttcacaaaaaattagggataatttagctctccagtggggtttcagccagagcagggatgagtctcaataggaagggtctggccacattccttcctgaggacccttcagggcctagaatgctgcttaattccacctcctgggtttcaggaggctgagtgctttctaaggatcagtggccatttgtttctgtttggctcctgcccggactctctctagagttcaaggctgaggcaagagcctatgagctgctccctccaagttatctgagaggttggggtggtggctattcttggttgccaacttgattacatctggaattaacaaaactcaagcagctgggtacacctgtgagggatttttttttttttcttttgtgggggagcttgaggcagggtttctctgtgtagctctggctgttctagaaatcactgtgtagaccaggctggcttccaactcagagatctgtctgcctctgtttccagagtgctgggattaaaggcgtgcaccaccaccaaacagcaggattattttcttaattaaataatttgaagtgggaggatccattcttttcttttctttctttttttttcttttctttttttttttgcttgtttgtgttttgtgttttgagacagggtttcactgtgtaacagcgtggctgtcctggaactcactgtggagaccaggctggccttgaactctgcctcccgagtgctaggattaaatgtgttcatcagcaccaactgtctgggaagacccacttctaatctggatcttttgaggttgattcacctttagtctgggccacaccttctgctggcatcttatataaaggacatggaaaaaggaaacttgctctctttgccagcttcttctcactggcaagtccattccttcactggcatgagagcctgcttctttggaattctgatgtatactaaagtccatctgagacatccagccttgtggacagaacaactactggattcttagaccttctgttggtagacagctgtcttagtgtttctattgctgtgaagacacaccacaaccaaggcaactttttttttaaagattttatttattattatgtatacaacattctgcttccatgtatatctgcacaccagaagaggacaccagatctcataacggatggttgtgagccaccatgtggttgctgggaattgaactcaggacctctggaagagcagtcagtgctcttaacctctgagtcatctctccagcccccaaggcaactcttataaagaaaaacatttaattggggctggcttacagtttcagaggtttggttcattatcatcatagggggacatggtggcatgcaggcagacatgctgctggagaaggagttttacatcttgatccgcaggcagcagaaggagagatggagtactgggcatagcttgagcatatatgagatctcaaagcccacccatgtagtgacatacttcctccaacaaggccacatctactccaaaagaccacacctcttcatagtgccactccctatgggttaagcattcaaacatatgaatctatgggggccatatctattcaaaccaccacaacagccattgttagaccggctggaccacagcctataagccattctgataaatcccgtgtgtgtgtgtgtgtgtgtgtgtgtgtgtgtgtgtgtgtgtgtgtatgtgtattcattaattctgctcctctagagaagcctgactaatagaggaggagtggtctggataccatctttgggatgtcagcaagtaaagtgagtacctagcatgagactatccatttgaaatatatctctgtatatttagaaaacctaagtaatataagtcttgactattataggtgactatctataatctttatttatttatacattaaaatttaagtaagctgtataaacacaatacctaaacaaaaatagaaatataacaaaattgaccttaaacttgtatcaataaaccaaaacctataccaacgcaaagtattcatttctatatcatattccctttttttcctctagaaagtgattgacttgtgatcattgaccatttataaccaactccgtttaaatgaaaacaaacatttataaataataattaggaatttggccatagttctcttcaaattgtttcctgctgttttggggggttgtcaatccccaggggatcctgagaaatcccagaaccatggccaaatcctgtctgaaatagtctgtgagactacatcttctcagctgttttgaatgttggatcaccagggccattgcttcaggggatcttgtttagaagggatccaagcttcttatcttctgtggaaacaaaagcagaactttttttccaaagtaacatgtctttagtaacatgtcttaaattttgaagtcaaggtgttttcaaaatatataggttggattaacccagcagcattgataatcaaatgtctttcagcagctattgttccttcctcagcagtcaaacaattcaaagccaacacaatagcatacagtatccagactctccgtgtattttccatctttatatgactttttattactcaatttctttcattttcatttatttatttgcttgttttgagacagggtttctctgtgaaacagtcctggctgtcctggaactcactctgtagaccaaactagtcttgaaatcatagtgatccacctgcctctgccttctgagtgctgggattaaaggtgtgtaccaccatgcccagctattataattctttcttaaggactttctctatcctttttcttttctctcccaagactatgtatatttttaaacacactgtaaaccgtttagagggttttttcctctggatctgttgttactgaatatctctatttttttttttttttgaccacatgagtctttattctactaaactgcaaactgcccagctagcacagttggtagagcatgagactcttaatctcagggttgtgagtttaagccccacgttgggtgccacatgtaggcagaggtttctgtcccgcctggtcccacaactatttaatcacaaataaacacatggaggcttttttttgttttttggtgttttgagacagggtttctctgtggctttggaggctgtcctggaactagcttttgtagaccaggctcgtctccaactcacagagatctgcttgcctctgcctccagagagctgggattaaaggcatgtgccaccagcgcccggccacacggaggcttatattgattataaactgtttggctgatgactcaggcttctcattggctatctcttaattattaacccatttctattaatctgtgtatctccacatggtcttggcttaccggtgattcctgggtcttttgcttcctcagcagctacctggtgtctccctgactctgcctactacctttctctatccctgtttggatttcctgcctggttaaattctgcctgtgaattggccaaaagcagctttattcatcaaccaataagaagaaaaacatatatccacagtacacagaaagacacccccatcattgaggactgagcaggaccaagtaccaatggcctgaacttcaattttagctctgtccataacactgcaaccttagactgatgtcattctcttgccttaattttctctgtacagtgaaagtagcttttttggagactgagatggatctatacattaatgtttatggcataaagtgaggactcattgtctccatcaccactgtcatcactgccatcatccataatacacagagaaactgaggaccagaaagggtacaggatgacccagagttacacagtaagccatagtggtacagggaccagaaggacagctgtgttacccacttgcatagctggctggcatcctgcccaatgttgcagttacaggatgaggaacagagcaggacagatgatctggggcatttgcctcctgtccctgtaactctcctctgtctctgttcatctttttaggggtccagtcaggacctctttccttttttggaaagacactcctggattcctgatgttaggatatatatctcctcaccattttcaaatgtcacctgttctttcttgtaccctagatacttgccatatctgaagccacctggatgattgtgacaccccccccccacacacacacactgctgcttggcccctctactctctggggaaattgttctaaagcacagatctctacttaaacccaccaaggtgtaactggatcaggaaaatgttatatgcatagaatggaacattatccaagctttaaaagggaaagctggggcagagagacagctcagtgggtaaaggtgctttcattaagtccagtgacctgagttcagtcctgactcttacatggtggaaggaaaatgactctcacaagttgtcctctgaccgccacatgtgcatcatggtacatgcactcatggatccttagagagagagagagggagagaggaagagagagagagagagagagagagagcttgcttcactggacaattttgaggattacatgttactgcttgcataaaaagtattaccctcatgcactggagtccgtatccccacttggtagtggttttatttgtttgtttgttttgtgagcaagttctcactatgtcactctgactaacctggaactcattatgtagaccaggctaaccttgaactctcggagatttgcctgcctgtgcttttttgagaggtttagagattttaggaggttgcaggtcaccaggggtgtgtttggtcctgggtccctgcctctctttcagcttccagtccaccataatgtaaagaaactccttttccaagaaccagatcacacacactctccccaaagccttcccttagtccctgtcctcctgggagcacgatgccagagcatgtacccctgtgcccccaccacttccttccggatagcttaatggggttcactatgtgcagatgagtgtgccaaacaaactccagtcaccgggatcttgatgaatcaccatgatggtcctgcaccgtctgcatttcgcaaatgtggaatcgaggctcagaacaggagtatatcacataactagtaagttgtgtccccaagacttaaacattctgaattccagagaaaaacttctgacaacttgttacagtcagctttctgtgactataacaaatgccttagatgaatcaacccagaaaaaggaaggtttgttctgcttcacagttgtagaggtttcaatcaatgataaactggccccattgttttgggctgtggtggtacagtccatcacaacaagaatgtgtggcacagggggtcattcacttatctcacagtagactataaagagaggaaaaagtcagagttccattatcccctttaagtgcatgcccccatgtccccagtggctccaaatgtcccactagaaccaccccttaaacatttcatcacttcctaccttggaatttaacaaattaatctttgagggacatatatccaaatcagaggaccatttgattctgttccccaacaccccctggaccatcacaccacctatctatcatttctcttcactcccctccagtcccagtgaggggagggctgtggtttagccatcccagagcttggcacagagcaggtgctcattttgctgacttttgtctgctgccctgcagtgagccactatacacacgcaatgctctaattctgcttccgcaactatttcccctccaggaattggcaggttggcaattgccaaagaaacatcttcagccaatcaataaataataatgttggagaatttaaaataagaatctggattattaaagttacaaatctttggtctttatgccttcaataaaacatgcatctattaataatgaatactggctcgggcctgcttaggctgaaaaggggaggaaaaaaatgaccagtcaaaagatgctaatattttttctttttacccagcttggttgccaagccactgcttccatgacaaattgttcgccatttgaaaggtttaaaagttttaacagcacaaaagggaaattggagaccaaatgtttagccttgtgaaccttcatggtctttcttaagtttttccgctccatggactcgtgctccctggtttctctcttagaccccagtagccccttctcttgtttactctttttttccctccagctttcctctttcctctcctcacctcccacctgacctcatccactcctagtattgaagagtctaggttccatccccagcactgtgtggtggtcacaaacctgtaaggccagcacttgggaggtggaggcagaggaccagaacttaacgtcgtcctcaactaactagtggtgagttcaaagccaccctgggctacatgagaatcaatcagtcccaatctctgtctctctctgtctctctctgtctctgtctctgtctctcctctccccttctgtgtgtgtgtgtgtgtgtgtgtgtgtgtgtgtgtgtgtgtgtgtgtgtggtgtgcctctctttctgtgtgtgtggtgtgtatgtgtgtgtggtgtgtgtggtgtgtgtggtgtgtgtgtgtctctctgtgtgtgtgtggtgtgtgtgtgagttgtgtgtgtgtgtgggtgtctctgtgtgtgtgtgtgtgtgtctctttctgtgtgtatgtggtgtgtgtgtgagtgtgtgtgtgtggggtatctgtgtgtgtgtgtggtgtctctgtgtgtgtgtgtgtctctctctctttctgtgtgtgtggtgtctctctctctttttctgtgtatgtgtgtgtgtgtgtgtgtgtgtgtctttctgtgagtgtgtgtgtgtgtgtgggtgtgtgtgtgtgtgtgtgctcgcacatgctgggagatagctaagttggtaaagtgcctacatcacgagcatgaggatttgagttcagatgcccagcactcatgtgctggtttggtcatgcacagctgtaatcctagcattgaggggtagagacaggaagattttcagaatcggtctaaccagtcaggaagtgcttggttcagtgagagagcttgtcttagagagacggtggagagggatctgatattggcctctcacctccacatgcacgtgtataatgtgccttcaccggtatatacacagtcacacacacacacacacagtcacacacacagagtcatacacacacagagtcacacacacagagtcacacacacacagtcacacacacacaggccgttacacagtcacacatacatacacacacaggcacacagtcacacacacacacacacacaggcacacatacacacacacacagtcacacagtcacacacacacacacacagtcacacacacacagtctcacacacacagagtcacacacacacagtcacacacacacacacagttacacagtcacacatacatacacacacagtcacacagtcacacacacacatgaaggaaaaagaatggagggtgcaggacttgcattgttaggacctgaaggcatatgtgtgttagcaaggcagaaactttctgctgtcattagttcccatctcttggtaagtcacatacagtttatgtgccttctggtttgttgatgttctagtaggacaacacttaaccacagtagcaccacactaagtggttggccagtgtgattcatcggaagggactgtgagtgaagacagacaaatggtttcttctcactttacagtatttcagcacagccacttgaccttcttcctttatgcccatcattttggacgtgagtccttccttagcagcaccacaaagtctacatgagatgaagggggtttcattctgaatgtagcaatcaaagcatgtcactttctagtgacttgccagtgacatccatttgcagaccattctgaaaatctttacgtgtcttttttctttttaaaaatctctgtgtgttgtctgtgagtatgtgtgagtgcaggcttgtaccgtgctccgtgagtggaggtcagggcatcttgggtgccagtccttgccccccaccttactagagacagtctcctgctgtgcttgctggcttgcctgcttctggagtttctccacttcccagatcccagcgggagtgctggagattcaaactctggtcctcacacttgaagggcaacccttcacacactgagccatttccccagccccaaccttcacactttctgtagtaaccaaagactccatctgcagcatgatgacaatcattttttttccctgtaaattgttttgtgatttggaaaggccttttattttttgttgagacaggatcttgcattgtaacttaagctggcctcaaactcactatgcaggacagtctagctttaaatatgtaatcctcctgcctcagcttcttgagttcttggattacagctgtgtggcatcgtgcctgactcaaaacacagtcaaaatgctgtggagcctggtaagaggcctctcagacatgagggtatgtatttgaacgaagctataaaaccctatcccttcctccttgtcaagtctacttctagaagttcttctacagctagaaatgccatagtctgatgagagatgctggcatcgaagagctgaccctgcctggagaaccagggaacaaggtgaaagtgccatggagcttgctgggccttaagaagaggaataggggaaaagagaacaaatgccggtttccacatgggaagcggcaggtactcgttctagcatacattttcacttttaaaattgtctctttttttttgttttatcttcctctttcccacacctctacattcacaaacacactgaataaccattaggattcttgcttgcaagtgacagaaaactcgccttcatgaggctgaaagcataggagtgccagcgtttgagtcattaaaatgtctgaaacctcactcaaacgttcagacccagggacggaacaatggtgccataacacggcctttctccgagactaaggtcttagcctgctcactccatgggacagaggaggctgctgtcagcaccaggtctgccatctcaatgcagttaatggatttcgttagagttgcagtcggattctttgtaaagcatccagtcagacaactacgaggaagcagttctcttgcagaaagtagggcagataaatgggccgttagccacagaaactgcacatgtctgtttccatggagtagatgccaggaagatgtaagctttgaggattgaagagcccccaggaaggatagaacttgagccccaagacgcaagatggggaaggcctgagaaacacagagctcagaagtcacccagcccttttactaggcaaatgaagtcatgtagaccagaaaagggccctgtccagggtcacaactaactgaatcagagtttagattcgaacacaggtgatgtgaaggccagaaccaagctctgtggacctggcagctgccacattcattagctccctcctatctgcttgtttcccagtatatttttacaaggctgttaattactagccataaagctcggcaaacattttgataggctttaaaagctcatgaaaaccacattacattttaaggcatggttccctaattaacccaattagctgtcagactcatatcctgctggtttccagatgaggcgagccctgcctctcatcccccaatccagccccattggacagggcctggagtgttcctgtcaagatctctctgcagtacaaagacactggcttagagatgcccgtgcaaacaagtggtgcctggccagcttagcttaggaccaaggctaaggtataggcacatgggggcttccccagtgatgctgccatccctgtcctcattcatagccttggccattttgtcatgcttccctcaacagctgatagacacagacggacacctgaccccaaatagctcagttctgaaccatgacatagctcaaagacatgggccaacttgaggcaactcaggagggagacaagggaagcaggtgtgatgtattaatttcttagggctgccatcacaacagcctggagggcttcaaggcaggaacatattgcttacagctttggagactagaagtctaaggtgctggtagggtgtcgcctgacatttcttgtcttcagcttgttaatggctacccattcctctctcttattctcaatacccatcttggccatgtattttatggctatcagcactgctgaatgtcaagtctaaggttcaaagttagaccctttaaataaggacctaaaagttagaagtctttcaggaaacttggacttgggttataaattgtactcttaaatctaaatgctcgcttcttgagttcttactatacaatttcttagatttttgcccttataggagcaggatgttcctggtagagtctggggtcagagaggagtagatgaggcaacagagatgccaattacatatgggcttgtgccaggtgatgggagataccttaacaccaggactggagggatggctccagcagtcaagagctcttggtggctcttcctgaggacccaggttctattcccagcaaccacatggcagctcacaattgtctgcaactccagttctagaaaatgatgccctcttctggcctccacacgtgtggtgcagacatgcaggcaggcagaacgctcacacacattaaataaaaacaaatgaacatgaccacccagattccagccccagggtcaaggataaagaataacatgattttataataaagatggcatattagttacttttctcatcactatgacaaaatacaccacacaggcgagtttagacttatcttggctcacagtttgaggagacagagttcatctggaagttgaggcagccaggcacactgcatccacagcaggaagcagagtaagatgaacactggtgctcaagtgctcagcccctttctccttctttttatttctcctttctctcctgaggtctcagccaatggagcagtgccaccctcatttaagatgggtcttcctgtctggattagcatgatctagataatccctcttggaagtttgtctcctaaataatcctagatcttgtcaagttgaccgatggtgactgtgaccacaatcacaccatctcctatctacagaaaagacaacttcactctccactgggctgagtgtgaagtccaagaataacatcagactcagtggtcagactgggagcagctgggaaatgtcctatttgggtcagggcaggctatttggcagtgaggttgagaacactgtaaggaggtcagaagccatctgggggttaggctattgtgggaaagggctagttctggtgcccagatgcccacaggactgagcaggaccatccttccagtggcttccatccagtcccaatctatttgacatacctgatgtatttcaatggatgcctcaacactgcaaatctagagcctgcctccttcctgtccactcaccttcgagaacctaatgagtttgcctaggttaaaatgttttattgaagcccagtgatggtggtatcactgagggaataaatcctaaactaataaaagttgagtgtaatctaaaatagcaattaatctctgttgtggagaataagaaaaatgaacaagccattgttgaaatatttattagcgagaaagacgggacagatgcatttgttctgaatggtggttgcttgggtttttgggttgtgtttttgtttttgttttctgcctctgtggtgtgtgtgtcagtctgtgtgtgtctgtaggcacacatgtgcacacttttcaggtgcacaaatgtgtacaggtacatgtgtgtgtttgtgtatatgtgtgtgtacatttgtgtgaagtcagaggtcaaacttgggtattattcctccagaaccatccttattttttttgagacagggtctctaactagcctaaagtttgcccagtagactaggctgtctggtcatcaagccccagggatctgcctgtctccctggaactagaattacaagtgtgtttctccacattcagctttttttttttttttaatgtgggttctgggggttgaacactttaccaatagactgagctatctccctagttccctgctccattcttaaatagaggcggagtagaccgagggatgactctagagcatacagggttcaagacatatgatctgaagttaaaaggccttgtcaattcctaggaattatgggttttcccctacaaatgctagatcactcctgcgtatagcagtactttctccttgggaccaccagcttataaataatgacacagagacttcttattaattataaaagctcaacctagccaggcgttggtgacgcacacctttaatcccagcactcgagaggcagaggcaggcagatctctgtgacctcgaggccagcctggtctccagagcgagtgccaggataggctccaaagttacacagagaaaccctgtcttgaaaaaccaaaaaagaaaaagaaaaaagaaaagctcagtctatagcttaggcttgttcctaactagctcttattacttaaattaacccatttatattaatctacgtcctgccatatggcgttacctctcttccatcttgcacctcctgttttctctctgtgtctcctggcttcccctgcacacctagattcctcctcctcttcctttctctcccgggaaatctcacctatacctcctgcctagctattggccattcagctttttagtaaatgaatcagagaaatataccttcacataatgtacaaatatctcacaatatcacctgtatagatggaagttttggtcccacctggtcccacagtcgttcagtcccaaataaacactcagaggctatattaattataaactgtttggctgaatgctcaggcttcttattggctagctctctcttaactatgaacccatttctattcatctgtgtatctctacgtggtcttggcttcctagtgttagtgatgtccagacctctggttccttggcagctacatggtatctccctggctctgcctactaccttttctatccctgttttgatttcccacctggctaaatcctgcctgtccattggcagaaacagctttattcatcaatcaattagggaaccatattcacagcacacagaaggacatccccatcacacctgcaggaaacacccaccaggcacctaaggttggcacctggaaggcaagggtccagagttttgtttcccaagggtggaacattgcttctgaagatggccaccgacaattcctcatgtccctagatacacttgccatttctcctcctcagagtctgagctggccttgtggatggctgagctgtaagaagccaagaagcatctactctctggcagccctgagccactggaaggaagtgctgcagaatgaggaccatggaggccaccctccctcatactgtagccacctcttccgaaggctatcaaggagaggggcaggtgaagggaacatagcaggacaataatacaagttgaaggctgaagttggagactgagtgtcttggtggggcaggggctgtccaacatgtggcatgttgttgattttgtcctggggatgaacccatggtcttgtgtatgttaggcaactaccccactaagctatatccccagatctgtgttttccattttgagacaggagttaccaaattgcccagactggccttaaacttaccctgtagcccacataggccttaactcatgatcctcttgctttaacctcacaagcaatgtgtttataggcatgcaccatcaagccttatatgtgccttgggatgtagtttagttggtagaatgtttgctactttaaatatgtcaaaaacaaacggctccaggtcagactccagaagtttgaaccagcccagttaagtcacgctgaacagggtttccttcttgtctctcacagtttctcttccagctgtagggcttgcaagtgataacaatagagtaacattagacatggaaaatatgtatgaatgtgtggtgacagatacaagaatgctctggtagctttgtttgtgatgtggtgttatgttgaaaagggctaagtggttaagagcacttgccgttcttgcagaggacctgggtttgattcccagcacctacatggcagctcacaaccatctgcaattccagttccaggggatctgatgccctcttctgacctctgtgggcaccaggcatgcacaagtggtgcagacagacaagcaggcaaaacactcatgcacataaaataaattaaatttaaaaaaaataagaaactggaaagaggttgaggatgtggcacagtggtagaccatttgctgctcacacacagatccagggctacagcccaaacaccaacactaagtgggaaggaacttggaatgaatctacacatcaagcaacaggaaaacggtccacatatgatgggggtccttatcataaaagtaaagaagtgccgggcgttggtggcgcacgcctttaatcccagcactcaggaggcagaggcaggcggatctctgtgagttcgaggccagcctggtctccagagcgagtgccaggataggctccaaagctacacagagaaaccctgtctcaaacaaacaaacaaaaagtaaagaagctaaaagaaatgactgagctacatgacaccatgagtaagagtcttagagacgcactaaggttgtatgctgatatataaatcaacctcactacagacccatcaaagcatttcataggagatatgtaactatatgcttaaatgtgtgtaagtactgtatggaagtactggggttggaactcggcacatgcgctgggttagcattctacaactgggctacactcacacaaacctgcaatatacacaatatatctatattatatgtaatatatttaatgtaaaatagcattttatttatttattgtatatgtgttgttttggaggcagactccttttttaaaaaagattatttatttatttatttatttatttatttatttattatgtatacaaatttctgcttccatgtatatctgcacaccagaagagggcaccagatctcataatggatggttgtgagccaccatgtggttgctgggaattgaactcaggacctctgaaagagcagtcagtgctcttaacctctgagccccgacagactctttttattttgttttgttctattttatttttcgagacagggtttctctgtgtaacaaccctggctgtcctagaactgtagaccaggctggacttgaactcacagagatctgcctgcctctgcctcctaagtgccgaaattaaaagcatgtgccactatgccaggctggacacagacacttgctagttcaagactcctggggtcaagtgattaccgtagcttcccaggtagctacaactgcactcagctttatttttgcggttgtgaggacactggtcttgtggttatttgttgtggcagctctaggaaacaaatgtaaccctccagtacctgcatccatgaacttttggattttgtgtgggctatgtgaagcccaatgttactgagaaccatgttttgctgaaaatttggtttaggtctggaaggtgctgaaaaggtcctgtgtcagctccgcactgttgtaaagtggaggaacctttgagaggcacatcccagtgggagcttttaggttttcaggagtgtgacttgaagaggattgtgggatgccagcctcctcctcactcacctcctgatcaccatgaggtgagaggcttgtttcatcctttgcttttcgttatgatacgctgcctcatcacaggcccagaggcaatggggccaagccaccatggagtgtaactgataaaaccgtgagccaaaatagactgttcttcctgcaagttgattaactcgtgtattttgtaatagtaatagaaagctgactaacacaggcaaacagaataagggctcttgaaccacacagcagactctacttagaaaataaggtcacagatttcccttaccaggccttccctggcaactcctgagttttcaagacttgagtgataatctggggtttagggcatctccatgctttcagtgctacccactgagggaactagaaagtctaggagtcatctataggcactgcaacatgctgttgctgaagacagattctggttagttccaaggacacttggtcattgccatcgggtgtccttgctgagtgtttacctgctgttgtctggctccctacagagtataaattccacgatgcagctcatgtctgcttcatgcaacactatttggggtttaatattggggtttaataaacaccagtcaagtcgatgcatatatgcatgaatgggtaaatgaaaggaggtctctaaagcaatggagatgagagtttcagagaaataatctaaccctcccacccaccccactccctcccctggagagcaagaaatagcaaatacttgccacacaaaagcttctgtcactttccgagggtggagacggttcccaaattcttagtccagtggttcagccatcttttgcaataaattgcaggaagataagaaaatggaacttgatagtaacaggattgaggtggttcagagagggttcttatggtggccattttaaaatacaactctgagccatgactttaatcccaggactagtgaggcaaagacaaggacagtctgggctacagagtgagttttaggacagtcaatgctacattttgcgattgctgtctcaacccgtgctctgcccccccgccccaaattaaaatacaactctggaattctctgccatccctcctacagaactgtagtctatgactcctcctcttgagtctgcatacttgaacaggggaatgtaacaccaataataaaaacccagagacagatatggggttcaaactgaaggtcagagaagcagagcagccaagccactaaagagctcttatctcgaccaaggctggaagggatcctgtcctcaatgtggctggagactaattgtcagagactgaatactgaatgccctactcctatcttatatacctctctagtgctgagattaaaggcacaagctctgtttctcttttagaccgattcactctcatgtagccccacgtggccttgaattcacagagatacacctgcctctgtctcctgagtcctgggattaaagatatgtgcggccactgcccagcttctatggctgtggctagcttttcattctgatcgtcagtgactttattagatcattaacaatgtatcagcacaggaaaatatggcagaaatgatgctatgtgggtttctaggaactgccaacttgggcacagtggcacaagtctttaatcacaacatttgggaggagacagaggtaagtggatctctgtgagttcaaggcctacctggtatacatagcaagttccaggcagccagggctacataatgaaaccctgtcttaaaaagaagaagaagaagaagaagaagaagaagaagaagaagaagaagaagaagaagaagaagaagaagaagaagaagaagaagaggaggaggaggaggaggaggaggaggaggtgggactggagaactagctcctggctcctcagttaagagcacttgttgctcttgaagacctgggtttgattgccatcgccacatacagctgtctaactgaagtcccagggcatccaataagcttctcctgacctccaaggcatgtaggcacatatattcacacaggcaaaacactcacatacataaaaataacaaaataatttcagaaaaaagggaaaagaaactcttggcttcttttgcttgtccctatacagccccggctggttttgaactggctaagtagctgaggatgaccttgaacttctgatctttctgcctccatctcccaagggttgggactacaggcatgtatcaccatgtcaattcattcttgctcttttaaatgctttttatgttttcttgttattttggtttttagttcttatttgtttattattttttatgtgcatgtgtttgagtgtatgtcatgtgtccaggtgcctgtggaagccagaggcatttttctcctggaactggagttacaggcaattatgagctgcttgacataggtgctgggaaccaaactcagactctctgcaagagctgcaagtgctctcaattgctgaaccctcgatccagaaccctgtgggttgtatgtatgtgtgtgtgtgtgtgtgtgtgtgtgtgtgtgtgtgtgtgtgtgtatgacaggcatttaccatgtagccctagctggcctgaagctttctacgtaggccagatctatctctgcctcctgagtactgggattaaaggcctgtgtcaccatgatgcccagcctgtcctattgatgactacaaatggaatcagagataggctaataaccagtaatttattaggggatatactcacacaagggaaccagtgaccagattagcaccccaagcaggttgggcccagaatgcttcccagtaccggctcagcctagagagagaccgtgtgctggccctccttgctcttatacaccctgctatgtacctgtgaccacgcccaagtgggcgtggttagtggtacctgtaatcagggtctcttcttacactgtccttttttttttctttttttctttttttttctttttttggtttttcgagacagggtttctccgtggctttggagcctgtcctggaactagctcttgtagaccaggctggtctcgatctcactgagatctgcctgcctctgcctcctgagtgctgggattaaaggtgtgtgccaccaccacccggctttttttttttcttttttttcttttttttaaatgtagaatcttgctttgtagtgtaggctggaccagaacttgttttgcagcctaggttggttttgaatttaccattctcatgttttagcctctctagtatgaacagttattcttgaaactcagccatcacactgtgaggaaattctactgctttgagaagagacccatatggagaggtaccagcagccaatttgcctttagtggggacgaatcctccagtcttggtggatacattgcacctgccatggcacaagcaaaaatgagctgtctctctgaatcctgcccaaattgaggatcctgagaaaagcaaatgttttctgtcctctgttactaagttgggactctcagctcttccgctgtgcttagtctctacagtcaaggtctgtctcccttctctgcctttaggcctcctgatgggcactcagcctgaagagacagctcacaccccatgaagagatagctcatatctgcaccagtgagatggagtgagggattttcctctgccccatgttcctgcaggaggattgcttagcctaaggaccacccaccacctttcaccttcccagcatccatgtggagatctggactgaaagcttcacagccaagggtggcttctggatgtgggaatgacgtgtgggttttgttgaagctatttcccatttctttcatccctgtggctgtttattaacctcatgcactggctgagaaagttgaatgccgcatctggctcgtggcttccctgtcaagtcctgttgctccttctgaatatatactctctgaactcggggcaaccgtctctgaagttgctgctaagtggttctgaaacatgtttagataccatttagctgcttgaatgacccagtggctgccacattaacctgataaactgtaggaagccacttgcctgctttcttcctcctggcattaggcagtgggttgaaccgaccctcacctcaaggacactttggacttcaggaggccaagggggcctcctaggcagagacagatgtgatctcaattttaatctctgtgacatagtctcatattcttatgaccttcgacaaaaaatgacagctgcctggctgaggggctccacgtctgtttattggggacaatgataacctcagaaaggttattttactttagattttaaaatctttatttagtttttgtttgtgtgtttacttgccggtatgtgtgccatgtgcatgtagatgccctctgaagccagaaaaggacattggatcacctggaactggggtccaagtgattgaacataggtcctctgctggagcagcaagtaaagagttgtttgaagggtctgagatgaggtacacaatccacacgttaactgaactcttggccctgtgagatcaacacaagatgagttcaaacacaccacttgcaagtttaatgcttgttaaggggtcaggacaatgtccatacaaagtccaagttaacctctgggcctcagttttattatttgcaagtagagatataataaacacctcctcaggctattatgaaaatgaaggaagtaagtgcttagtaaacacccacaacagacagcgctacaatcaggggcagctgttagcaccctgtgcttcgttaatccagacgtgaaatctaatccatttcttatttttcacatcaattttgctccccgccaatatctgaactgctgtttagatggtaccctgttgattcgtacatcttttatggttgtacatgctaggcaaagataagtttagaagtgtaaacatacaaaataaaagaacaaatcaaagttaaaaaaaatggaatagtagggtttacaaaacgcgtttggatgcagtagtggagaaaggagttactgtttgctacatgaactgtttaagttgactttggcatggcaactcttgtttatttccttattgtgtttatttccttatgctatgtgacgtgtgtgtttgtgtgtgcgcgtgtgcgcgcgcacgtgcaaaggcctaaggtgtcttcctcagttgctttccagcatatattgtaacacagggcctttcagggaactggagctcattgttcagcctaccttgactagccagtttactccagaggttccctgtttctgtcgtggctcacaggcaagcctcgctatgctcacctggcttttctcgtgggctcctgggtccaaactgcagcctctgcacttgtggagaaagtactttacatggccatccatctccccagcctatttttgatttagttttttgaaggaagggtctcaagtggcccaggctggcctcaaactcactatttagttgaggataatcttgaacttctagtcctcctgcttcttctacctcttgggggctagaattgcaggcaagtgtcatcctgctggatttttttttttttaactatagtactggagaaggtgttcagggtctcctgaaggttagatcagccccaccagctgatctaaagctctaacctatagtaagagttatttatgtaatcatttgatttcttcttcttcttcttcttcttcttcttcttcttcttcttcttcttcttcttcttcttcttcttcttcttctttaaaaaaagacagaatctggatatgatagcctaggatgattttgaacttactgtcatcatgcctcagtctcttgagtgatgtgccaccaaagctcaggggctatagacccttgtcttagccacaaacaggaaaattctgaatatctttaaaacatttatatttactatgcatctgagtttaggagaggaaaagaaaaatctcctaaatgtctgaaaacaggagtgatcttgaaacaaggatacaaactctaagaggatccatgtgcttctctaagaggatgttgccacagcccctgggaggacccatggtcttcagggattagatgtgttagctttctgttcctgcagcaaaacacctgcgaccttcaacttagaaagaagaaaggtttatttggcccacagttggaggtttcggtttatggttcattgactttgtgctttggggctgtggtgagggagatgatcgtggcaggaatcatgtgtcatagaaaaatcattcatttcatgactggtagcaagacaaaggaagaggaggaactaaggtcctatcagtcccatgggtccagtgacctaagacactcccacacccctctatgcccatctgtgaaattttccatttccttccaagggatgcaaactaggagctaaaccttgaacacacatgcctttggaggatagataacacccaacgtataacaaaaatgggctagagacagggttgtaatagccctgtggtcaggagatgatgcccagggggcatgagaaaatgatctagaactaatatcaatttaaaccagagctggagcctgggaagaaaatctttcccctgaaaggggtctagagtttctcaagtttgggcccagatctgaaggcctaatgtctgaggtgaaactggaataggaatccagaggtcaacatgagccatccatcagggcccgagcagacagaggcagagagtgataatgaggataacagtggccactcgtcatgagcccactgtgtgcacacactgtgcctagcacttcacatttaactctcacaacttaccaaggtagatgccattattgtcacctaatggctgtgtttacagatttgggcaattaacagatgaaaacaaaatagctctccatagactcagaaagctagtgagaaaggcattctagaggtttttgtttggggtgagggtggaatggggtggggtaggggctgtgcttgtcacagcacaagtgtagaggtcagagaacaacttctgccatgtttgccccagaagttgaactcaggtcttatctggtttgattgcaagccctttcactaccaagccatcttaccagccctatttatttatttttgagacagggtctcatgtattcctgcttggcctccagtccactttgtagctgagaaggagtaccttgaatctgatcctcctgcctccatcttctaaatgttgggtgtggtgttgtgggtctgtaaccccagccctagagaagagtgaagacaggtttcagaagcttgctggccaaccaatctagttgaatcagcaagctccagggtcagtgagagaccccaggccaaaaaataaggtggagagccattgaggaaacatcaagtgatgctggcctctggcctacatgcccatatgagcctgcctacccatatgcacacatgcacgtgaggatttacacacacacacacacacacacacacacacacacacacacacacacacgcatgcatgtacacacgcaaaaatataatcggaagaatgccatcagaaaacatccaagagccagcacttgggaggcagagacaagtgggtctctgtgagttcgaggccaacctggtctacagacagaattccaggacaggctccaaagctacagagaaatcatgtctcaacactgctgccctccccaaaaggctacagtattgaggctggagagatggctcagtggttaagagcactggctgctcttccagaggactggattcaattcccagcaaccacatggtggctcaccacagtctgtaattcaagttccagtggatctgactccctcataaagacatgcaggtcaaacactaatgcacataaaaataaaaaacaaagtatatttaaaaaaaaaggaaaacatccaagactttcccactttgctgtaaatctgcctatgtgatatttccatcaatatatttgaaaaatgtcttgatttataatttttctctgtgctgttcctataaaaacctcatgaaactactcccacactggcacatgggatttgagctcatctaaacatgtatccctgggtcatggtcacgcatattcagcattggagtaaatgatctcttattccctttgaggtgagagctgtgctttcacattgacaaaggtttctagctgaggctttgacctgtctccttcaatcagagcagggactttttgtctgttttaagggttggtttttttgtttttgtttttagttttttatttttcaagacagggtttctctggagccttggagcctgtcttggcactctctctatagatcaggctggcctcgaactcacagaagtccactgcctctgcctctgcctctgcctcctgagttctgggagtaaaggcgtgagccaccacgcccagctttgtatctgtctagttcacttgaggcagggtctctcactgaacttggagcttgtcattttggttacgctgcctcttcccgtcaccattttcatctgttcatactgtgcttctccctcaggagactcacttcactgttaaacaagtaataatcaaactataatacagtaaaagaaaacaaaacaagaatccacaaacactgcagtcaaatagaatgtctatttgctgccagtcaggtgggtcctttccctcacagcatcccatgatgctaattgtgccattagcccttctctccaacttctggatgggcactgtactgagtctctgtttaggaccatgtcagcatttggctcggaggaaatcctctgacctggaagaattccctggctcacctaggaggtcaaggggcagagagacttgggggctgggcacactttttccaggatgtaggctgtttcctggctctggggctcctctcccacagcaagaataagaatccatttcctgttcattatatttacctgaaaggtaaaacaggttctgtttttggaagcctcttgattgcagccttataaagaagctccacatgcagaatagggggaaattaattggtcttccagggagcagctgaacgaagtctggtaattgaatttcacaatgaatgcctccctctgggtggcccgagtgtgatctggaatggatatttgaagttttctctgtgtaaacggcttgggctcctcaatgtttatatttttggtgggcatcactcattcacactttcatcaagaaaaaagaaatgtacatttccttacaaactctgaaatgatagaaaggggaaaaagagggggagggggctggtctcatctggagacacaatttggcaggctcttcgcagagactggggaagagccaactgagagaataaattattgcttgaaaacaggctgtgtcagagtggagctgcagacccagctgctaggtatcagagcagcctcagggctccgttccaaaatgagttatgcttggtgaggtcgggagccggaaagaacacatgaggtcatgatgccaatcaataccttgaactggtggatgcggactaaactgccctcctcgagatttaactcacccagctgcccagcaaagacttaactaactgtgtgtttctgtctcgacagaatagttactagtgaattaccttggccttgggatagccatggaagacatgcaacctcaaccctgggtgggtaacagaccttttcagctcctgaagtccaggttagaatcagcaatataaaatatagtcagctgtctagatctgtggattcaaccaactaggaatagaaaatattaaaacaataacgcaccctcccaataaacctcaccttgttaatattgagcacatataggctatttttcttgtcatgattccctaagcaatagtcttgcaaatatttacatagcatttactcagtatgaggtaggggaagccacctaatacttctgaagtcatttaagaatgagaggatgtgtgggttatatgcaaacaccgtggcgtttttttatttcttatgccgagcattgagcccagggccttgttcacaccaggcaacctgggagttacatccctagccctgttgttttacagaggacgaactcttgattttgatatctgacaggtgtatatgtgtgtgtatgtatgtcctggagtcaagcctcagtgtatactaatggatggttatatactactagaaatatatagaataaataggattgtgatgtgaaccacaaatgcaaatcacatatgtaatttaaaattttttagaggctgaagagctggctcaggggttaagcccagttactgctcttctagtggacctaagttcgttcccagcatttatgtcatgataacatgatcactggggtttaatggccaacaatctaatggtgagagaccttgtctcaaaggagttgttttaggtctaaagccttctccactcaccccaaatagcagtgctggtgacactgtcccaaacagaaggacttgggccagtaaacagaagaattgctgctgggtaaacaagcctaaaaagagtttttgtttacaagaatagaggatctgctatagtgggttcctaatctgcagagagaggtggggcttgcctataatccccagaaggctctgcaggaggatcataaatctgaggcctgctgggcattgtggcgcatgcacacctataatcctagcactctagcggcagaggcaggtggatgtctgtgagtcccaggccagccaaagctacagagtgagacactatctcaataaccaaaatctaataataataataaaagaagtctgaggtctccctggactacatgatgagactttgtccccaaaagaaaagtaggaaagaagtcactactgagatgaatcaatgaaagaaaggaagtgaacaatattgttgcatctcacttatggaactgaaatttccaaaaaacaaacttgaaattgttagacccccgaaaactcaagtatcgggatcccaggccacgttcgaggtcaccccaatcaccaggtgcattcgagagcttgctgcaaactgcacgaggctttattgtaatttaacgagctaaccctatgttagctcgggtctttcacccacccgccatggcggatggctaggaaagacggcttctagggtctcccaaaagatcttatagggcagcataaggggcgtgtctaggtacgcacaggcttacgcacaggctcacgattggtgtgcttccaggcttggagggcttgccctgtgttgattggtcaactggttgttatggcccataggccctcccagggtggttgctatgctctctacgtcattgctgtgcgcttgttcgtaaagcacacccagggtcgtaaagcatagcgccaccagctaacttccgattggctccttgtcacgagacaggcatctgacctctaagtgaccaaggcaggtttatggcaagcacgttttcggctgttatggctgccaaaagggaagctggttccttcaaaatcattaaaaaaccaaagctgtccaccccacaggaaaaaaaaaaacaaacacattcctgactgggggaggaaaccttggaccagaatattttagcagagagagtacagagaccaggctcgctaaagaagccaggactcagcagccacagagctctgcccctggccaccataaagttcttgaaccaataatggcagaaaagacacccaaggcagctctttggctctatttcaaaggagaaaacaaactgattttaattgcagagggataaggattaagggtgatacagagaaaatacaagtcaagaaaatgtgagcaaggtacaaggatgggttagcatctctcttgttctttccgtgtgtgtgtgtgtgtgtgtgtgtgtgtgtgtgtgtgtgtgnnnnnnnnnnnnnnnnnnnnnnnnnnnnnnnnnnnnnnnnnnnnnnnnnnnnnnnnnnnnnnnnnnnnnnnnnnnnnnnnnnnnnnnnnnnnnnnnnnnnnnnnnnnnnnnnnnnnnnnnnnnnnnnnnnnnnnnnnnnnnnnnnnnnnnnnnnnnnnnnnnnnnnnnnnnnnnacaatgacgtagagagcatagcaaccaccctgggagggcctatgggccataacaaccagttgaccaatcaacacagggcaaaccctccaagcctggagggacaccaatcgtgagcctgtgcgtacccctagacactccccttacgctgccctataagatctnnnnnnnnnnnnnnnnnnnnnnnnnnnnnnnnnnnnnnnnnnnnnnnnnnnnnnnnnnnnnnnnnnnnnnnnnnnnnnnnnnnnnnnnnnnnnnnnnnnnnnnnnnnnnnnnnnnnnnnnnnnnnnnnnnnnnnnnnnnnnnnnnnnnnnnnnnnnnnnnnnnnnnnnnnnnnnnnnnnnnnnnnnnnnnnnnnnnnnnngtgtgtgtgtgtgtgtgtgtgtgtgtgtgtctgtgtctgtgtgtctgtgcgtttctgtgtctgtgtgtccgtgtgtctgtgtgtgtgattatgtgagagaaagagtgtgtgtgtctgtgtgtgtgtgtctgtgtgtgtgtgtgtctgtgtgtctgtgtctgtctgtgtgtgtgtgtgtgtgtgtgtgtgtgtacatgttgttctagtttcattctgtttctgtgacaagtatggaaagcagtttagggagtggaaggtttatttcagcttacacttagaggttacagtccatcattgatgaaagtcagggcatggacctgacatagaatccatggaggacactgcttggtggctcactcacaggctcatgctcagctttctttcttatgtagccgaggaccatctatctatctgcctagggaatggtgctgcccacagtgggctgggccctccaggacagtcccccatagacatgtccacaggccaatctgatctgggcagttcttcaattgagactcccttctcaggtgactcgaggctgtgtcaagtcgacagctgaagctaactagaacatgtttgtgaattctccccccccccccaatcaaaagtagtataactgcagacctgcatgggaagaaaacaaagagacagatgaaaattgttttatatttcaaaaacatgataaaactatagtgaagttcaattaaataatttttttgcaggtctaggcattgaacgaaggacctcacgtattcaaggcactaccactactctatatgcccagtcccttaatttcagttttcaaaagaacacaaggtaagatgccaaatagatggatggaacccaaggaggccaattgacagcccaaactgcaccattatgattaataaatctaaaaccacagagaacacacttctgacaaacacaaatgctaacacaaaggaaagagtctagatgaccgttatgagctttgaggaaagggacacaggcttaaaactagagaggctgtcagaagggttcagctggtgaaggtgcctgttgacactcctgctgccatgcctgcctctgcccaagtgtgatgtctgcagtctatggcagaaggagaaaactgactcctgcaagtaatacacacagagagccacagacacagatacacacacacacacacacacacacacacacacacacacacacacacacaccatttaacaagaaaaagcctggatggtcatgatagaacacacctttaatcccagcgcttgggaggcagaggcaggcagatctctttgcgttcgaagccaagcctggtctacccagtgagttccagggtagccagggatacacagagaaaccttgtgtcaagaaaaacatggcccctcaacaccaacaaaaaagtctagcaggcatgggaaacaaagattcaatgcaaagaaaatagacatcagcaagtaaaagacaaaggaagacaaaatcaaaatgataaaatgaagagatttctcttaataaaacaaagcacaagccccagtatatagaaatatggtgttcttggaaactttaattaaaaatatctcacactgaaacataatctatcatgagaattccagaacattccacgaggaaagatggcaatttcaacagtgtctagagaacacgaaaaggaatagagttgaactccacctgcccattaaaatcaacttaccatgaagcaaactcctagagataagaattaaaactattacattcttagaagaaaaaataagtgaaaaatctttgtgttaggtaagtcttgtaaatgtaacatctcaaacatactagataaacaggacctcaccaaagttaaaatgtttgtgctgcaatagcccacaaaacaagagaagttatctgcaaatcatgtgcctgtaagaatctattttgagatcatataaaggatagttaacaactcagaagagaagaaacaaacagcgcctttaactagcactctgaaagctgaggcaggagaatcgtgattttgaatttgaggctagtttgtgttatataatgagatcctgtctcaaacaaacaaaaaaatgcatacaagcaaacataaaaatgggcaaagtagtttgggtgacatgcctgtaatttcaggtattggaaaggctagagcaggcgatattgagtttgaagacagcctaggcaacacagcaggtgctgcctcaaaaatcaattagaagatggggagtggataccaaatagaaaatatgtaactgttttttttgggttttttttttttttttttttttggtcttttgagacagggtttctctgtgtatcccttgtctgtcctggaactcactttgtagaccaggctggccttgaatttatggagatccgcctgcctctgcctcctgcatgctgatattaaaggcgtgcaccaccgatgcccatcaataaataactcttaatgttaatggtctcaacttcctaataaggaaaacaactaattaattaaataattaattaaaatgaatggacatttctctaaagagagacaaattgccaagaagcacagggacaggtgttcgccattagccgctagggaaatgcaaattaaaaacaacaaacagtcaatagtgctagggagaaattgtaccctcataaaattgctgctgggaatctaatatactgcagttgcccagaaaacagcttggcaattccttgaaatattaaaaagagactcagggacccctcctgcacatgcattccaaggaactgaaaacatgtttgcagtgaaattcattccgatgtctggacaacattcttcattttagtctcaaactgaaaacaacccaattgttattcatcgatgcttgttgacacctgcattgtgatggttaatcttgttaatcaccctgacccactgcccagagtcctgaaccgaataaaaaggagcaatcaagcagggtgttggtggcacatgcctttaatcccagcactcgggaggcagaggcaggcggatctctgtgagttcgaggccagcctggtctccagagcgagtgccaggataggctccaaagctacacagagaaaccctgtctcggaaaaaccaaaaaataaaaaataaaattaaaaaaaaaaaaaaaaggagcaaccgagtggaacaccagcgtccatgcctctgtgtttcctgagggtgcaatgtgaccagctgccttacatccctgtggccaggctttccacaccaagatggactgatcgtcagaataggaaccaagacaaatccttccttactcaagttgcatttgccaggtgttttgttacagcaatgaggaaagtaactaatacacacacacacacacacacacacacacacacacacacgacagaatattatttaccctgacagaaagatgggattctgaaacctgctatgacatgaatgaactttttcatttttatttatctgattatttgatattatctatttatttttgctaagtaaaagaagctagccctccccaccccccaccaaacaacatgctgtctgatttcatttatatgaaatgtccagaatgggacgaaatgagacaaaaataatacggataacaacaaaccaggaaaaccaggaagtaaaagaagaggaggaaagtctgttacgatttcaaaatgatcagacaaataaaaccagagtgtaatataagaactaaccacaaggctttgcaacctcaagtcacaaatctaagatggctattataaaaacaatctcttgaagtgtgcgactatttattttgaatttcaatatttattttagtttcttcagttcccttttcttctagtaaatggtaacaaaatatgcaaaaagcaatactattcattaaaatttggatttacagtacaactccaccttaatcaagtattttgctagttctgtgccggcacagagcaatgtttacaatgctgtttctttggtgtgaggtgtagatcctggtgtctggtgtgatttcttcccttacctcttcttcctagcattattgtattcttcataaagattctatcatttttccccaaacaataggattaattttctaagtgcctgaaaaaaaaaaaaaaaacatgccgggattcaacatgacagcatatggtttgttattttggtactttttatttttctttatttttaagatttctgctcctatcccttgctatgagccgcactgcttggctgggtcctggcaacctgactggatgatgagggagtgaagaaaggacagacacaaagggtgggaattggtgggtcatggccttggatggagtgggccatggctttggatggagacatatcagcagctgggaaacagcacatttattacctacctctgagaggagatgagtctattgtatacagctgaacaagcaggtagatttagctcatctgggtaggcagtctctacaggggtgcagtctcagtctgtaatcagccaggaggaagctgccaggtaggtggattctttgtgtcaacatcccacactgactgggggaaagctttgtcattttcctgagcctgcctgcagcaaggctttactattcccacgtgtctgaggcattccggtccttgacatgtctgtgtccacaccaacaatatacattcactcagcacttcatccattgccacaatccttctgcaggagactgactcaatctttagaaaaggctgaaaggaactgcgttttgtagctggttttgtggacatacgcctgtcatctcaggactctggaggttaagacaggagggttgctgtgagtttgagaccagcctgggctggtcagtgagtcccaggtcagagctagatggtgaggctctgtttcaaaacatcaaacacacaaacacccactgcctaaacaacaacaaaaaagaaatacagaattgtggattcttttgtttgtttctttagtagagaaaaggtatctcaatagctttggcttaagtccttcctctaaggtatctacactcttgatgaggaaggcaagatgcaagtgccctgacttgagtgtctgggtgaaaatgtggccccagaacttggaaagagactcctttcaaagaccataatacaagcttagaccagggactaaaaagatgttgccacagcctggaccagcagcactcaaagacctgtagggccacagtgtgatagtgtgctgactgctggaggggaagagtgacaatagtaaccatcctgcaatcctgttcttatcacttttggacttaaagaaataaaagagccctttgatcccagcactcaggaggcagaggcaggcctccctagtctacagagttccaggacaggcagaggtacgcagagaaactgtctcaaataaataaataaataaataaataaataaataaataaataaataagaaaaaagaaacaaaagagaaacaaataaaagaatctctaacaattacttctgagagctaatgaatggttcactatggttctgtatggagccttagcctgcaagttgactgtgttttaaagttaccgtgtgtgtgtgtgtgtgtgtgtgtgtgtgtgtgtgtgagtgtcattcccagagactgggtcctgagacttactgattaggctagatagacaggctggccagaggatctatctgtctctactctccagcaccagggattgggattacatatgtactccacctggcttttatgtgggtgctggagatcaaactcaaatcctcctgcttgcatagttagtgctttattaggatggttagttttaattgttaacttttaattgtcacctggaaagtgtggctcagtgaggaattgcccacatttctcattatgtgggcaggttgtaacaggttgtcttgattactgtggtagcttgaatgtaattggcccccataagctcacagcaagtggcactattaggagatgtggctttgttggagtaagggtagctttgttggaggaagtatgtcactgtgggggtgggctttgaggtctcatatatgttcaagagacgcccagtgtcttacaccactttcttttgcatgcaaatcaagatgtaggactctcactcagctccttctccagcaccatgtctgtctgcacgcctccatgtaccaccatgatgaccatggactggacctctgaaccgtaagccacccagttaaatgttttcctctataagagttgccttgcagtggtgttggtggcgcatgccttgaatcccagcactcgggaggcagaggcacgtggatctctgagagttcaaggccagcctggtctacagagcaagttccaggacagcctccaaaacaatacagagaaaccctgtctcgaaaaacaaaaacaaaaacaaaacaaacaaacaaaaaaagagttgccttggtcatggtgttccttcatagcaatagaaaccctaagacagaagttggtaccagagactgggatattgctgtgatagaccagttttgtttggaataatatggactttgggagtttggcttaggaaagcaatagaatgctttaagtactgcttaatgggccatgctagtagaagcatggaagacagtgacactaagaattacttgaactgtagggccttggctcaagaggtttcagaggagaatattaatatgtggcctagagactggtcttatgaaattttggtgaatgtgactgtcctttgcccttgtccaaagagtctgcctgaggctaaagtgagagttttggattaattccattggcagaggaaatctcaaaacagcctagtatagacattgttgtgcagttactagtgttaactctaacgaagatttataatgaaaaggagaagactgagcagggtaaatgacaatgtacaatttgaggagaaaaggatcaccaggaagtggaagggagctaaatcctatgttcaaagagatgaacagattaagaagtggaataaagggagtggtgacctcggggcaagaatccacccagctaaatttccaacttatgaaaaggaattaaagaaaagcttagagtcaggtatgatggtacacacctttaatcccagcactcagaaggaagaggctggcagatctctgagtttgaggccagcctggtctacagacaaagttccagaacagccgcgcttaggcaatgaagtaaatcatggaaaacagaaagctggtgaagaatatattgaatgaggggggcatggtccagccccagcaagcagcagagcatggaagctttgtccacatggttctctggctctagagtcaaggataggagaaaggcattatggaaccttcctctgtaactaaggaaagccactgaggtgtcaggggtgtccctgaatggaggcccagtagagaagccggtgctcgaagctgtgaaggtgaagcctgcatttccttggtgaatgtaagatgttggagatgccagagtagtgggatacctgctgaggagagctgctagcagggagtggaaccagcccgagagagaaatgtgttgcagtcaacaaagctgaaaggagttggagatgccaggcggtggtggcacacacctttaatcccagcactcaggaggcagaggcaggtggacctctgtgagttcgaggccagccttttctacaaagctacacagagaaaccctgtctcaaaaaaccaaccaaaaagaaagaaagaaagaaagaaagaaagaaagaaagaaagaaagaaagaaaggagttggagatctgaagaccatcttgacatcagactggagacacagagtttggagttttcccagtaggttttcagtcttgttttggttcaatatttcctcactattctctttcctacattttggacaggtaatgtttatcctgtgctattatatgttggaattatctaattattttttgattttatagaggattacagttaagagattgcatgaatcttagaaaagacattgaactttggactttaaaacattgttgaaattgtgataaatgatgggaacttttgaaattagaataaatgcattttacattatgatattgttacaagcttacacggagtggaatgtggtagcttgaatgtaattggcccccataagctcatagtgaatggcactgttaggagatatggctttgttagagtagggatagctttgttggagaaagtgtgtcactgtgggggttagccttgaggtctcatatatgctcaagccacatccaatgtcttagaccacttcctgttgctgcagatcaagatgtagggctctcagctacttctctagcaacacgtctgcctatatgtcaccacctcccaccatgatgacaatggactgaacctctgaactgtaggctaaccaattaaatgttttccttttaagagttgctgtggttatggtatctctttgctgcaatagaaaccctaagataattaccttaaattaattaatgtagggagatctagcctagtgtgggtggcaccatttcctaggcatgagacttttggagagatattcagccacagaggcccccaggggaatgtgaatcaggtattcaaagtgggatctgttgagaatcatgggcttgcttattgtgaattttctcttcattcctaattcacccaaaacttctttgcttagtgctgtttattattattattaattattatcattattgtctttaaaaataggctagcctggagctcacatctgactcagtgctgattttaaaattatttttttctcatgctctttttttttaaaaaagatttatttatttattatgaagacagtgttctgcctgcatgtaaccctgcaggccagaagggggcacaagatctcattacggattgttgtgagccaccttgtggttgctgggaattgaactcaggacctctggaagagcaggcagtgctcctaacctctgagccatctctccaccccccttttcatgctctttcactctctctaaatgaatgtattttgagactgtctaatgctgattaggctagccttaaactggctatgtagccaaagatgaccttgagcttctgatcctcctgcctccccctctcaaatgctgaaattataggcctctataccaggcttctgtgggtacttgtgatagagctctggacattgtgcatgccaggcaaacactctacccacagagctagagctacattctcagcccaccacatctgtcttttcatcaactaatattcatctctcagtcatttccggaaaggttctttgaaatacgtggttttatggtccattcagagaaagttatctacatcaggccctgaccatggatcctggaaaatcagcaatagaacagcaggcttttgtattgttttgtttcttaccactcactttatgagacctgctcatcaaagagtcaattcctgatgcaattacacatgtaacccatatgtcccccagtggctcttgctgtgagtgacctcagcaagatgggctcaggctcagttccatggcctgtaggcccacaggttcctcctcaggtgccgggagcccccaggggactcctgctcagtaaaacctgccttccagagtcctgattctggtatgaatctcagtgacccagatgtgaaactcagccacacacacaaacaactcaaatcacaaaaagcgttcatgggtataattagattttccctcagttgataaaaattttaaatacagacaagaacagagactaatctaataagtgtctgtgccctccaaatcagaatttagtgttatcactttacaatgtttccttccggtttaaaaaaaaatgtctaataggatataaagtgaaatctctcaggcacacccacctccctaaagatatatgcaggcatttggtatctgccctttgaaaacttcttctcatatatctactgtatcataaatgcctgtcttgcatggttttaagatccacataattgtatcatattttattttctgcaacaggcttttaatgcaataatgtgtttttaagagctatctttgatgatatatacatatagatagatgcagatatatacagttcattcatattaactgttatgtagcatgaatatttataaatttgtctatgcaaaactctacttgtagacagttaagatttttacaaagttccctctgtgacaaacaatgcagcaaaaagctattattcttgtatatattttatgtgtcagagtttcctttaaagtttctagaagtagaattactgggtctttggtgctctgtgggatattctggacttgttctcaggtgaacagcaggtctctaagaacagaagcctgcagagtttctggtgtctcaggctcagactggcataatggtttctgcctcgttctggtggccaactctagtccagtttagactcaaggaatagattagtgggcaggagataaggctcagtggttaagagaactgctgctcttccagaggactggggtttgatccccagcacccccatagtggctcacaaccaaccataactccagtactaggggattttctgatctctgttgacaatgatgcacacacacacaaacacacacacacacacacacacacacacattaaacactcatacacataaaatagcaaatacatataagataaaataataatgtaaaaaaaagtgtttgttgcttttttttttttttaagatccaagttctgttcccagcacccactattgcttcatagctccagggtatctggtgttgtcttctgacctccatttacctgtttttatatgtgcataccaccctgcaaccctcccccaggcatataacataatttaaaataatagaaccgggcaatatagtaacacacgcctttaagcccagcacttaggaggctggcttaggaggcagatctctgtgagtttgtggccagactggtctacagagggagttccaagacaggctacaaagaaaccctgtcttgggaaaacaaaaaacaaaacaaaataccactgaactggcactagtggggctggagagatggctcagtggttaaaagcactggctgctctttcagaggaccccaggtttggttaccagcacccacattggtagctcacaaacctctgtaactccagttccagacaccagtatgcatgtgacacacagacacacattcaggaaaacaccccatatgcataaaataaataaaataactttttttttttttggttttttgagacagggtttctcggtgtagcttttgagcctctcctggcactccatctgtagacaggctggcctcgaactcacagagatctgcctgcctctgcctcccgagtgctggaactaaaggcatgcgacaccatcacctggctaataaaataacttttaaaattaaaaaaaatagttggggatggacagatggcttagcaatcaatagcacttgttcttgaagaaaacccaggtccccactactcatgtggtggctcacaactatccatcattccagttccaggtcaaccttcttctgacccctgtggctaacaggcactcacatggtacctatacacacatgcaggaaaaaaaaaaacattcaaacacataaacaaataattctacagtgttttaagaagcccagtagagggcctgagaggtggctcagaggttaagagcactggctgctcttccagagggcctgagtttaattcccagcaacacccgtgcagatatacatggaagcagaatgttgtatacataataaataaataaaatcttttaaaaaaacacttacatacagaaaagtaaatttaaaaccaaccccccccccaataattgggaccaatgctggatgtggtagcaaattaggataaaaggcgtgagctaccaccacccagctgccagttcagtttttacatacaatgtaatttactctacagatacgccttaagcatttttgggtcttacattgaatgagttgtggtaagaatgtagagatttcatgtcatcacactgctaagtgtcctcttgtaactggcctggcaggcataaagatatctggctatcttgacacaagagaccccaagaaactggaagtcccatgggaaactcatgctggtagaagaaaatgccagccatagtggtaactttaatccagtaaataaatttacaatttttttttaaagattttatttatttattatgtcttctgcctgcaggccaacagagggcaccagatctggttgtgagccaccatgtggttgctgggaattgaactcaggacctctggaagaacagtcagtgctcttaaccgctgagccatttctccagcccctagatttacaatttttcataccaccttgctggaataactgcagcccagacaatgatgggtgggaccataacgtgactgtgactggagactgttgatagataattctgaccttgacttacaccttaatttcatttcagggtcctgaaaatgggtttttgggggatctctggttctctttgtgcctctttcccatgtggccacatggaacacataactttttttctatgtttccctgttaagtgtcttatcgaggatggggtgtggacctgacttgttaggtcacaggctgtgatgctctgaactctgctgtcatgatttccattgctcaaacttgtagaatcatccgctcagaactttaaagggtgaagagaactttgcttctcctatgtgagatccaggcaagaggcaagaacagtttcaaaccaggttaagacatcaccaggacagccaaggtggagacattgttccttagagttacagaggagaggggagcagagattggagtcagggatcaccccacaggtcctcgggcaggccagcaaggagtttggctgaaggatagagttgtgagaggacaaacggaccaagggaggcatttatggattaaagaaaagtgtttcaaaacagcccttcaaacctgggccgatattctgtatggaaaagggcaaattgcttgtacagcagaattcctggggagttctcagatcatagtgtgagaaagaggatggagaatttggttccacttgcaacaaagaatccttgtgaacacagaaaaggccagcattttggaaagggaaggctttgaacttcattcacatggagtctgtcagagggataaactgtgagggcgggacaaaaggtgatggcagaagatggaactagtgagggtgtctttctcagttttaactgtcaacttgacacagactagtgtcatctgaaaagggggtctcaactgaggaacagcctatatcagattagcctataggcaggtctatggtggaatggcttcacttaattatgtagcagggcccagcccactgtcaaagtaccattccctgggcaggtgggcctggcctatagacaaaagctagttaagcatgagctggtgactgagacaaggaggagtgttcttacagggtttctgcttctccaacgctagggtttttgactttcttcagtgacatactatgacctgaaacagtaagccacttttgctcaaagtgtgttatcacagcagccgaaggaaactagaacagtggggtggggtaaccaggagaactcacgtgcctgggtccacgaacagagcagaaagctgatctggagtgcttgagtgataagacaagagcatacccccctgtttagctcctcagagctgccctcagtctcttcaccaggtagcactatgcccaggggctaaccaggagtcttgctctctgagtttttgttgccctgaggaagacttgtagggtatgaggaggcaggagcgagtaatgaagctgatttcccccagcacactcttcactggagccaagccttgcaggccactcttcatcctagtcagttggtttcatagtcccataagcaccctttcttcttgtccctacaggccaggactcttcccccttccctcataatgttgcaacctctgggatggcttcacagcactgctgaacccctttagccctgtctacactttaatgtttgccttgttggctccaatctagcatcatctacttcctgatgggactcagtaacaaccatgtgaggcagtttctttaaaagggcacctgtgaatttccagggattattgttcctcttggctacataggcttagaaacacatccttttgtctggagtctttcctcccagaatgagtcttggtgggaagtagagttttctactcatgtagaatgtgaaagttctagcctcccttgcagctagggtttggatatatgacccaagctctgtcaatcagaggcacaaactagactttggataaggagtctgagacacagggacattgaggaggtagggccagtgactgttcctcgaattctgctctgaggaaccattaaggcctggtgaggactctagctagcatcctgcattgtaggacacaagactgccatcaggttggccctgtgtttctgctatcacactgtccaggtccaagttcctctgcctcccagcagggtcaaagctctctagtctcttgtcctctgattcctactctgcttagatttgagtcagcttataacttgcatttatgaattccagctaggggaggtttcctacctcaaatgtagactgtaatcagtgcttacctctgcctctatttttggtgcttcctcagtcatcccctgcctccaggtagctgtcattttctttccagctgtgcagtggggaagggggtgatattttgacacagggtctcatgtagccctggctgaatgatcttgaatctcctatcctccatgtttgctccagctgtacttctttattcacagaaaggctgtacagtctgtgagttaggagacatccactttaatggatcaaaatcccacacgaaaagctttctcactgtgaggctagagtcaagttattgcacctctgtgaactctcttgtctccttatctatccaatgggagacatcttgttgtgaggactgggtaagagaacttgtgtgtgaagtctccctaggctgcctggctcctagtcaccatcaataacagccgctattatctttatacacgccattatcatcaccatcaacatgattcaaaggccttatggagcctacttagaacaggcatcatcaaaccaaatacctgcaggaggcaggcaggcagcaaggacaagtgctgaagagtcatttataccaacacattggcacaaggtgggagctagagagaatgagagccaggtctgtctcaagggggaagccactgctcagcaatagccatttactgccaagtgaactgtgagccagatgatgccaggcttcacactatttcaagcaaagccaaaaattcagatctttatagaaagcttggtgcttcatgaaaagctacacaaacactgcactgaggtcacaacagactgaggaggccagttcgtgtttcttcatgtgggactctaggtccactttcaattgccaggtgacaacctgcttgggttgggttcattccatcggtacagtcattgatagctaacacccctgcctacccagtagagaatgtgagagacattccctgacacaggtgttggtctcaggcacacttagagaggagaagtaagaatttcaggtgtcctccaacagttacttttctgtgggtgtcaggtccactgagggtaaatgcttcaggatgtcagtgagcccccagtaactgcccgattaccacaggttcagattctcttatgtatgttatcacacgtccagaggtatgaagaacaggaccaggacacagattaaatgtatctacaggatttcaggctttttccatcttttctcagcatggaaagttttgcctcagtggttgcaggatagctacaaccacacctatcatgattatgttctaggcaggaagaaaagaatatgataaggggtggtccttatactaaaatttcccagaaacctcagcgtatttccttttctatttcattggccagagctgctgcccacatcagtacttagtcacaaaagaaacgagatgggatatttttagatggttacacggaccatccaaacaacatcaggtttctgttaattggaaacaaagtgagaactgagtgagagtaagcaacctttagcctctgcagcctcctctgaatacagactacatgtcagaccccagccaagtactagagacctcagccttccctggatctcagccacatgaacacaagtgattggatctcagtttgaaatccaaagcctattcagcagaaagatatgggagtggttttaaaactcaaccaagccaccaagtccaatgctgggacagcagctctgggtccctccctgtcctgttctcccatacccctctctgtccccaccccttctgtctctgtggccccacccaggcccaaggatggtggggagactgtgtgattaacaccactagcagtttcaggaggcacccaagagagacattctgagagaaatatgtccgcggcacagctggtttataatgtgtattaatccctgacatgtaatttgagtaatatatgtaaagcagaaagttcaggcgctgatttaggggccttattattaccctgtcagcagaattcatgttctatttgcacagtgctctgggtccagcatctcatcctgggtgacagaaggaggaggtttcctgatggagacagctgatagcgggggtataggtggatcctgatggagacagggtgtctgtcagtcaagtgcttagagcccccagcagggttgccaggtacctacatagcccagggagctatggaacaaaaccaggttcgtactacttggcctggaagcagatccatgttcattcctcaagagggccataactgtaagtctagaaagtcatggtttggaattcaaagccaactaggccactttattatcatgtgactttggacagttttcccagttttttgatggttattccatatgtgcaagtgggaatcagaatagcatccatctaactgaggcttaaaaacaggttctgagcacttatgaaggactacagtggaattctaaatgtttgacatgttttctcaacgaatccccatagcaacctaataagatggatgtatgatgccccaacttagagttgaagaaaataaggcacagagaggtgaagtaactcattcaaggtcacacagcaaatgactgatagagcttaaagttgccctctgagatccaatggaacgttctgtcataatagaaatgctttataattctatgctgtctggtaaaagatccacttgccacaattggccattgaatgtttgaatatggcgattttgacagaagattctaactttttatttaactgtagctactttaaatatagtggttggtggatatgcagctctagactccccagtgctctctgactacactagagggcttagctttgacaactgttggcctagaaccccaggaagctcctatgttagcaaggcttccgaaaaaaggaccacatagccatgatggcacacttataatcccagcacttgggaggcagaggcaggtggatctctgtgagtttgaggtcagcctggtctacagaacaagttcaaggacaggctccaaagctacacagagaaacactgtctccaacaacaaaacaagacaaaacaaaaaaaaatcaaaaaacaaaacaaaacccagtgctagagaagtggaaacaactggattgctggccagctagcatagactacttaataaattcctgtaagagaccctgtctcaaaaaaggtggaaggctcttgagaaacaacacttgagattatcctctgacttccacagcatgtgcatatgtgtatacacatatgtatgaaaacacatacatgctcacacataacaagaacaacaaaacaggatcatgtaagggagaaagagatgaccagcgtcagttgttatgtctttccctgtgccatgcagaataaatgctgctcctttaagatgagtgggtgttatggtgtgaacattgaggttcctcaaaattcatcttgaacctcggtgcccaggcaacagggaagtctaaaaagtgggacctttaagaggtaattggtgcttcttacaaaagctcaagcgggcatgttcatctcctccatcctttctgcagtgtgagggctcatgtctcatcttggcagcaacaaggtgctgttctagaagaaggaaacagcctttcccagagtctcactctgccagcacctttatttcagacttcccaacctccaggttgtgagccaattagtttctgtctgtcaagaacacactgagctggtgggtgttccgggtgtcaggctggggttggagagaaagcctagtttggtgaaggtcttggcatacacacgtaaggaccagctcccaactaaaaagcttggcatggtggcatgtttgtaatcccagcactgagaaagtggagacaggaggattcctggtatgcactggtcagccagtttagtgtaatgatgagttccaggtcccagtcagagatcacttcaaaaaaaaaaaaaaaaaacaaaaacaagatagatgccctgaggaagggcacccaaggttaacctctggtctccacatgcacgtgacctgtacacacatgaacttacatacacacacacacacacacacacacacacacacacacacgtaggggaagctgtagccacgcctgcttaggggctggctacaggtgtgcctgaccacgcctgcgagggcatggtcagggtgatgtagagtgagaggcagtcaggtggccgggttcagtttctgttttgctttcggcttgctgtacagactgctgccgcaccagctggctaggtcgctctgtaagttgtcgtggcccggcttgtctcagctttaacccatgacagccatgaggttctacctgagtgggggtgtgtgaacttggaagcgtctaggaacgcaacgacgataaagaccaaacataggcatcttgtcatctttagagagctctcagttccatgttttggaactagagccattagtttattaaccatcttttctggtgtcccttaacatcctgctaacactacgaggcagccatttctctcttgttctctctctgcttgcccacttcgctcctaaccttctgtcctaactcacataccaccaaccccgctcctaaccttctgtcctaactcacataccaccatccccttctcccaggtgagggcctattcagatgctaggcacatacagatgcaaaataagaggcatattaccctcaggccaggtaaacagtaacagcctggtgttaattaacaatacaatagcgggccatagtttcctggcttcacggctcctgacagccagaacctggggcccaatatttggtcctccacagtaagtaaggctttttccctattaaaatcccttgtatttctacctggctctgtattggtaatttccacattacacacacacacacacacacacacgcatacacacacacatcctaggcccttcagagagccccaggatcctagatactgtctgccagtgagctaagatgacagacacaggctctaatcttctacttttggacctggcagtctagtagagaagatgatgttaaacaaatggccactcagctaattatagctgacttgtgattttttgactttgcgatgggtttgttgggtcataacctcatcataaatggagtaatgtctatatttataacagttaattaaagggccatctgagtgcatgccaataaagcaaagtgatcaaacggcagttagagaaagtggttggagaagcctaacccagcagttgtgtctggggctttaggagatggtttgtctcagatatgttgagaaaagaggaggggcttgaatttagtctaaaagagttagaagttgtagccagctgtagtggcccatgcttatgagccagcctactcaggaggtcaaggcttctgtccagcttggataacatggcaaactgctagctcagacaactggggtctgggactggtgagatgagtcattgggtaaaaatgcctgctgtgcaagcctgatgcctggagttaaatatccaaacccatggtggaaagagagatctggttcatccaaattgtcttctgatctccacatatgagcatgtcttcccatcatgcacatatacacagtcatcaccatcatcatcatcaagtcagatgctgggatgtggctcagttggtaaagtacttgcccaacatgtgtgaggccttgggttccaaacccagcacgacacatacacatacacatgcatgccctaaggcatgcgcgcgcgcgcgcacacacacacacacacacacacacacacacacacacacacacacacatccacaaggtagagaaaaataggttaacatatcaggggatgagaggctggggagatggctcattggttaagagcactggctgctcttccagaggacctgggtttgattcccagaacccattttacttctcacaatcatctattatttcagttccaggagatctgatgctctcttctggccctgtggataccaggcatacatgtggtacacagacatacatgcatgaaaaatacccagatacataaaatgataaaaaatattaaaaatattttaaagtacacccaacaagctttccagtagcaggagcagtgtgggtgaaggcatcaggagacagagtccttcaggtcctgacctcaaaatacacaatgactgggagcactggtgaggtagccttgggaagatgatgtccctacccccttgccctcctccattgtgaaattattccaacttacactgaattgttggctgttaccctgaagtgatgcaggtttctgcatagggacaggtgtgagttttgtcttcaaaagcaattcagctgtattgaagagtatacaattgggccgttttctagccaggtaactgtgacattcctttaggtctaacatcactcttgggccatccaacctactttccacagggaaacttcagggatcttttcaggttttgagtttttcatgcagttaaaaaagccaaacattttagaaagttcatctctcctgccctctccatttttattgttgtgggttttgttgttgttgttatttgttttgctttagggtctcatgtaacctaggctagtctggaactcacaatgtagatgagatgaccgtcaatttctgatctttctggttcttcaaagtgctggggggatccagttcaggatcttgtacaagttggcaaacactctaccaatgagttacattccagtcttctgtcccctcttcaaggaatcactctgtctatctatccatctatctatctatctatctatctatctatctatatatctatctatctatcctcatatctatctatctatctatctatctatctatctatctatggcatgtaacataggaagggatcactttaattagtttttttttttctgttctcttcaccagacttttctgtacattctatgcatggaagttaccccacattcttgggaacatttcctcctcattcctgcttttgttggtagtaagtgtgtgtgtgtgtgagagagagagagagggagggagagagagagagagagagagagagagagagagagagagagagagagagagagatttgtttaggtgctcgaaattgtacccaggggcttacacatgctatgcaagtgctctaccactaagaaatgactccagcctccaaaaggaccctgctggttgtcctctgacctccacacacatgccacagcaatacttacccatgaacacactcaatgagtaaatgagtaaagaagcatatagtaaagaagcatgcaggtaatgaagttgtgaactgcttttaactaaactgcatgagtgctttgttcagattctcatatggatataagccctcatttctcaagtataaatgcccaagtacgcaactgggttgtatagagttacatatttagtagtaataaaatgcacataacatggctcacgcctttaatccctgcactcaggaggcagaggcatgtgtatctctaagtttgaggccagcctggttgatggaatgagttccaggacagtcagggctacacagagaaattctgtcttgaaaaacaaatacatgctatagatttacccttttaagcattttaagcgtacagtccatggcattaagcacactgacattgttatataaccatcaccatcatttgttgccagatctgtacccattcaccacacagcaacgtcctcttcctccctctcctagactcttataaccaccttataacgcaagcacatctatgtgtctacatatcatacacatacacacatacatatatatagagagatatagatatatagatatatatgaaactaccaagtttttataggtcagcctcagtatttaacattctcatagctgacataggaatgctccagtttccattactccccattggcatttaacactgtttttttgttttgttttaaccattctgatgtgtgcaccgacaaaaggctttgtttacacatctagattctcattctacagatacgtgaattgcaaacattttctcaacagggtctttcacagagaaagtgttttgattatttttattatattagtgtatgtgtatgtatgacgtatgtgtggtgtgagtgtgggcatgtatttgccacaacatgttctcttcttccacctttatgtgttccagaaatcaaactcagatcatcaagcttacacagtgagcatctttactcatggagccatctcaaagaccaagagaaaatgttattttgtattgttttgtttttccacagggtttctctgtgtagccctgactgtcctggaaatcgctctgtagatcagactggccttgaacttgcatagatctgcctgcctctgccttccaagtactaccccacccagcccaaaatgctattaattttaataaagtccagtttatcaattttatcctttattgaccatacttcttctgggggtcaagtctcataactatttggcaatctgttttgagttagtattttttttgtttgtttggttttttttttttttggtttttcgaggcagagtttctctgtggctttggaggctgtcctggagctagctcttgtagaccaggctggtcttgaactcacagagatccacctgcctctgcctcccgagtgctgggattaaaggcatgtgccaccactgccctacttgagttgatatttttatgtgtcagctttaggttggttattttcctttcccttgattctcttcttctcttcctttcccccacacttctcttctttgttttccctgtgcatgatcagttgctgctcctgcaccatctgtttaaaagacttcaaaagcaggcacggtgccacacgcatggaattctagcattggaaggtgcaagcaggaggactagaagctgaaggccattctcaatttccatcttcaaaaacggggtttggggctaggtggtggtagcacacgcctttaatcccagcactcaggaggcagccgcagttgaatctctgtgagatcgaggccagcctggtttacagagcaagctccaggacagccagggcttcacagagaaaccctgtctcaaacaaaaacaaaacaaaaacaaaacaaaaaacaaaacaaaaccccaaaaccaaaccaaaccaaaccaaaccaaccaaccaaacaaacaaacaaaaaaaaaaaacagggcaggagcaggagctgggcattggtggtgcacacctttaatcccagtactcaggaggcagaggcaggcggatctctgtgagttagaggccagctgagtctacaaagctacacagagaaaccctgtctaggaaaaaaaagagggggggtggaggtgggggtggagaccatccttcttccagttgaggactggagagatgctcagaggttaagagcactggctgctcttccagagggcctgagttcaattcccagccacaacatggtggctcccaaccatctgtaatgagatctggtgccctcttctggcctgcagtcatacatgcaggcagaatgctatatacataataaataaataattcttaaaaaattctttacaacaaacaaacaaacaaaaaacatactcctactggcatatgacaacgttactgtggggttatcagtcttctagctgggcttattgtctcccatctttctggaaccacaggttaaactgagcttatttaatggttggagatgatgggattgcaagagaatgtacccagcggtgccagcatatttcagaaccttttgttcatgtctggtgacattctatcagccaaagcaagactcttggccaagctcaaagttaaggcaagaaaattaggcacagtctatggaggtagagtcaagagaggcctggcatcagtagaatctatcacctaacaaaagcaagaggtttctcttcttataacggcttttattcacatgggacctcaagctctctttataaatattccctatgttcccttctattctaaagtaccacagtacaattaaccctcaaaataatgaatattcacaatactttcttctcttacctgacagaacagggttttagaaaaattcacactcatttttctaattagccagcatctcttcccaacaataaagaaatgagacattgcaacattgactccgagtttctatctctacacttcctcctctgcccagcaggctgaggctgctgcttcttagaggactgacaatagcccagtggtttctgctcaggcttttacatgcacacaaggtcttctgtttgagaggaattgtgcattgtgcaattcttcataaagaatggctttgttctagtttttaaggttatataaggttacaaaacataataaattaatttagaaatgatccaaaaaggagagagaggataagagtcagaacaatcgctaagacgtctactttctttgctgccttgtgtggttgaagagaagagacttagagatttaacagggaagttatgcagtatggcatgtgaccagggaatgttgccctaccttaataccttttcctaattttttttttcctttatcactggtgtgtgtgtgtgtgtgtgtgtgtgtgtgtagaataatttgccaggaggtattgcattcctagagggtccatacaatatttttatgtgcttgacgaccacccattgtcagccacggttaagtttctctctcatcccactcacactagtggacaggtgaacatgtgttgccatggaagcctcctggaggtgtctcttatattttggggaatatatgaatcggtcaagtattctttttggaagagatagacagccagttgctactagtttgagcaagatgaggatgtattattggtctatatgtggcgtatatatttattggtctatatgtttagggcagagcagatctgagggatacctggattcaggaatccaaacttctccaggttcttcctcttctccaagggagatgaataaggacaatggagactccagaattacagcctttgggctttagtaacttctggaggacagaaaacatatcaccttttgtacagtttggatcttgtttaaaaaggaaatgaccttaactggcctggtttgaatcacttgtttatggcctggaccaatcattagcagaatacagatgaggaacactggggaaatcacaggaaaccatgaaatcctgtgttccttatgagaccagaactgtgaggcaagtggaaaacagcctgttacttttctttctttctttctttccttccttccttccttccttccttcctgccttccttttttttttttttttcttgagaccgtgtttctctttctagtcctgaaactcactctgtagaccaggctggccttcaactcacagagttccacccccctctgtctctcaagtgctggaattaaaggagtgcgccactatgcctggcccttagttacttctctgttgctgtgataaaatgccacgatcaagacaactaatacaaggaagagttaatttgggagcttccagttccagagggataggagtcctctatcaccatcatggcaggaaagcattgcagcaggtggcggacacggtggctggagcagtggctgggaactcacatctccaacaataacaggaagcagcgagaacaaactcaaacggtccaagtctttaagctctaaaaccaccccagtgacatccctcctcagcaaggccacacctcctaagcctctccaacatggtcaacaactgaggaccaaatagtcaaatatcagagcctctgggggccactttggtcaaagcaccacacaccctcccccagtctgcactgtaggaggttggcggtacattgtattggagggggttgtgatctggaagttcttcccgcactgacatgttgtaaccctgatgtaaaataacactattcaaggagacagctccctctcaagatgtctttggtggcccttcagatttggtccttgtagatcgttgcctagggcaggttaaatgctgctgaggtggctggacttggatgacaaaccaggtagcaagtgcccagctttctgagatgtcacttttggaaacacgaaaacacattgaccttgaccccctgggagaaccgattcctgtcctgcttcatagtgatctctgtttggggtttggcaaatgacctggacaccagggttgggccacaacagccccgagtgctaattctagatctattttccgggttctgccataccactgatcaaatccccctctgtcatctcctgtattcctcttcaagccccccccccacatcttcactcactcagaagccttaatgagcactgtagaactttcttaagattggccaaaggtattaagattgccaagtagctgaagcagggggatcacttgagccaagttttaagacaactgggtaacacaggggattttttttttcctcaaaaaataatcaaacaagctgtgtggtggtggcacatgcctttaatcccagcactcaggatgtgtaatggggggtgagggtggaggtggaggggagccaagacaggtggatctctgtgagtttgaggccagtctgtctatagatggaattctaggacaaggagattatacagagaagccctgtctcaaaaaattactaccaccaccactactactaattaaacaaaaggttggcacataaccacatttatctattttaaaataaactaaaaatgtttaaggtgtatatgtatcatatgcttgatgaatccacatttaactagtttgttgaatgacagacagtatctgccttgattctaccatattcttattgcctattagccccccccacagaatatataatggatctgatattttaaaatattgaatgatatcttagggtatcttcagataagaactggatataaatgtaggtatggcagtgtgggcctgtagttgctgctacttggaggctaatgggggaagatgcttaaggctgggagtctaaagccaacctaggcaacacagggagaccctgtcaaaaagaacaaataacaaaaacaaaacaaagcaaacccccccaaaaacaacaaaacaaacaaacaaacaaacaacccaaaaacctaaactgaaaacaagtagtttagttggtgggatggatccaaggaaccagtttagtaaggggtggggcaggaaagaaagtctgccgataagttgttattttccactgaaagcaactaggctcaattctgctgagggcctctgggagacagtcaacaacgttcctcagagttatcctatgcagtgggaaaggctatggaggtcaccgtcacttcaccacctgtcataggctgatggatatatctgtgggcatttcatctccggtcctccactctggtctcctgagtataccaagattgctcttacggctgggaatacccctcagctgcgtcctggttgcagtaatcatgtctgaagtgtccagtcagtgacaagtgaattccactcctctaaaccatgtattattggctcttgctactccactggatcagtggggaggggagaggggaaggtgaatcacatgtggaagtccatatgtcatccttggtctcttgggataatataaagatttcccagagacaccagcttgagtagaagggctggggtatgcatacagactctttgactcaaacgtgatggagggctgctgagatgactcagtggctacaggcaacctgagttctattactgggaccctcatggcagaaggagagaactgagttcagaaggttgccccatgagctccatgcgactggaatgacacatcagaagcatgtgtgtatgcactcatacacacacaaatcaatggactagacatggtggtatagtctttagtcccagcactcaggagacagagtaggcagatctctgttagttcaaagccatcctggtctacatagagaattccaggtcagccaggaatacatagtgaagctctgtcttagaaaaaaagatagataaataaataagtaaatgtaattttaaaatattgtcaaaaagtgataaggggattgaagggatgactcagtggttaagagcactggctgcccttccaaaagacctagattcagttcataggacccacacaacagcacatacacacacacacacacacacacacacacacacacacacacacacaccctgctatcctcagactgctgaatttgaggcatccaaattggcaacccgatctctctggcacacagctctctcatctaagcgggaataataacaactcttcctcacgggttacttcgaggattcagcagagtgggatgtgggatgtatttagaactgtgtcagctctgagtaaatggttgtcattaggacaacctgtatcactgaaactttcagcccaccctgggaagcaatctgccttccatcgattctaaactgagggcagtaatctgcatggcataggtggttgtgattctgaaaggagacacaggtaaagcaacaatagctaatgtttactgagcacttgaatgagctagctattatgctgttatgagtcagaaatgtatttgacatgaagaagcaagattcaaaacagcagcacaaacactggagactttctttatctcacataacaagaagtctaaagaatctgagctttgtatttcttccctgtcaggttcatcaagtcaattcttgtcctcaaggtttcaagatggctgctatacctcagtgtatcaaatctgtgttccaactaatcatgaagctagtgagtggaggatgaaatgaagggacaatgagggcatcatgcaaaaggctaaaggacaccagctggatcttgcttaaaagccaaactcaaagccaggcaggtggtacatgtggcggtacacatctttaatctgggagacagatctctgaattcaagactattctgatccacatggtgaattcaagactagtcaataggaccctgcctcaaaacaaaacaagcaaacaaaaccaagaacttttctagtaacaccagacttgtcatcatggccaaccccacctgctagacagcctaagaaatggagccaggttttgacaagggagactaaatttggatgcagtcagtttataatatatgccatctatgcattttcctgtttaatcctactcaagattgagtgagtagaagcaccatttgttatagatgagtgaactgaggccgggagagacaagaactagcccaaagtacacagttcacaatcagcagaatcagattagaacccaggtctggacccttctccattaaatcatgttacaaagtgttaattcatttccttgcctgcctctcctatgaggttccaccagcttgatgctgctgaggctgggcttctgcaccctgtccctacagtcacagggacaggagagctggagataagaatccaaagaaagaatgaaaactaccatacccaaagattctctggtctttaggccttgtgacctaggtgagcttacaaagttgggaccattcttgtgtgtgtaggacagggtgggctgagtgattatcttttgatatgggcataaatgctagcagagcattttcaaataattgtggtcagcatagtcagctaggcagtgatggtgcatgcctttaatcccagcactcaggaggcagacactggtgaatctctgagttccaggccagcctggtctatgtagcaagtcccaggacagccaaggatacacagataaaccctgtcttgaaaaaccaatccttcctgctcccccaaaaagaaaaaaaataatgtgattaaagggtttcagatcagcaccctgcaggcctaaacgactttaaatttttcagacgaattaataatattttactgtttggaaatttcacattgtaaactaagtttcccgtttctctaggggaaaaatagcaaaacaaaatagttaactgggtcacatgggaactaggatccacttagtgaccctttgctggagcggggcagtgaccgaaccttttcagggatcatgtggtcaccattacagtactcaccccacctacttcccttgtctgtgccaactgctggtcttgaagactgggactgtaagagcttgagttgcttatgctcatacagccacagaatggggcaactaggaactaggtcacggtgacttcccctagtgaccttccaccatagctgtttctgagggtcttcacctgggtgggagctctacccctgcttggccatagcttcctcacctataaaatgaagacattaacaatatcattctttcaggagggagagggttttttgcttgtttgtttttgttgctttttgtttacaacaacaaaaaactgctcttatgtatgtgtctttaccacagaagccagaagaagagtgtcagttcccctggaattggagtgacagacagttgtgaactgtcatacaggtgctgagaactgaatcagggtctatcttcaagagcaggaggtactcttaatcactgagccatctctccaggcccaaatgagaagctgagagctgaggagctaggcaacattactgaatgactattgtcttagtggcttattgctctgtaataaacaaagcacccctcctgcagtttggaggtttaaaatactacatgatttgctcaagaggttttcagtctgggctgggctcagctgagtagttttacaactgactttgctcatgagcttcttttcttgttatttttttttcttactttctttttggtttttcaagacaaggtttctctgtgtagtcctgtgtcctagaactcactctgtagaccgggctggcctagaactcagggacctgcctgcctctgccttcccagtactgtgcaccaccaccttcccatttatgatcattctgtgtgcattggttgagcactgggctcagcagggaagctgccatgattctccacatggtttaagaatctcttctccttatgtattttctccatatggtctctccatcagggcagctagacattgtctagggttcccaattccaggaggacaggctttgatgtgcaaacacttgtagtgcttctgcatgacttatgcttgctgaggtcccactgtcccatccttggctgacattagagtctgagtgccaggctgaagatgtcactcagtggtagagacctgtctaatacatgcaaggccctggtttcgaacctcagcatcacaaaatggaccatgatactggagcatggcactggaggctatcagaataattgtctccacatcattttcatgatgtataatgggtagaagggagttcaccttcacttttagggtgaaattggatagtctatgtcacccttttcagagctctcttctctgaaccagctcagatttcaattttgcagctctgcctagaaagttgagggtgtcagagaaccagactaagtttgaactagtttttaatcacttggattgccatgattgtgttcctgtggagaagggtttcactgtgggcaggaggacaaggcctaaatcaggcaccatctgagtcccctggctgggttcaaaactgagaaggttttcggctacctggtgaagaactgctgaagtgcagcaaataaaaccatctgagaccaacatccaggcatgaactctcttaaaataatatgaaaaagtgggtttggagaagcagatggggaatatagcgcgtgaggcctgctgacacgcacatggaaggtgagggcagaaacgaaggtaactggaaagtttctggtggcatttgcacctcttctgaacacaagagtggggtaagggtggaaggacctgtgtagctgtcatttcctggacattcagtcttttatttatttttttaataagatgcttcggaaatgggttttctcgttaaaacaaatgctaccgaatgcagtgtgtcgatgtttatattccttctaatgtgcttctgcttgagcaagcaagcccttaatgtccgtttcaattaatgcggctgcctctgatctgggtgctgctgctcttggatgcaatgcagggtgggggaggtcactggggtgtgggaggcagtgctgctcttgtcagggcccttagaggcccctggcaaagaagggaagatgtggaatgagtcactgcctccttagtgaagaccatactttaaagatgccagcctgcctgctgcttgataaaaaacgagcgtggagaccattggcaaggcagagaacagagcaaaggctccgagagcccagccagtgaggagcttgactgaggagaactgtccctccaaccctgagactccagcaaccagccacaagggtggagtctgtgagctacaagtttgctatcctcgggtgccctgattctgccacatacacctcatgtcatgatggtgtcatgacatgatgacatgtcatgatggctcagagctagtggtctcattccagcaggtctgccggtggcctgaggtcaggatgtcggtgtgagtgggctgggctgaggagcagagcaagctttagagagaaacagtcacaagctgccaagccttcctccttctcttccttttcccttctatcatcccacaagatgtttaggaaaagaatatggatttatattgtcccagagtcaagcttcagaatgagttccccctgtagtaagtcagtgctcttgcttttcatctcatgacaatcttttgttatgccctctcaccggagaacacctgtgtgtcaggtgataataaacacattatttctagttttccaaataactttctaggtaaatgttaatgtgtccactttatctatagagggcaaaattggggtgcacagaaccacagaagcttgtcccgtaagtagcaggattggggtttccagaggcctgctcatttcgatttctggctccagtgtcatcaattattgagcagcagggagggccaagttcctggctaaggcttgctaatggatgcatctgaaatgagaaatatcttcaagtttcagacatttacagtgacaaagattcaacacagactagcctgcattgtcctaggagtcaagatgtgaagctcttgccctgttctgttaattcttctgatatgcagctttcagtctaaatgagttcctgtctcaccattggtacttgaacttgaaaaagaagaatgagaacatatggcggtagaaatagaagggaggtttcccagcccaaaccacatgaaacagaagatgatcagcccttaaatttataagaaaaaacaaatcagggaatagagagatggctcagagattgagagcagtgactgctcttccagagaacccagcacccacacgtggctagcaaccatctgcagctccatttccggggagatgtgaggctctctttttgcccttcaagggtattgcatgcacatggtgtacagacaaacaggccaaacactcatacacccataaaataaatgtaaaaacagtaacaaatcactgctttaagtcaccaagttttgaggtcgtttattttgtagcaacagataacataaacctcaaaggtgtctgtctagttacagactttaacagcgagagactgccagtttttagaccacaacctacaattattggtttgcagacataatttatttggcttgcatagggttatttttcaaaagatgatctgatacttagaaactgggagatttcatatgagaatccctatttagagggtctcttggaaaaccttgcatctcacacctgcgtcctagcaacagctggctagctgtcacctatctgtgtgtgcactctatagtttaccacagtccctccactccttgttatcttgctcctaacatgctttctgacccctgcaggcatttgaatttttgattcatgctgttggcatggcaatgggaaggcactggaggcttctgaggagaggagaaaggataagagctgaacagtgagtaacgcattggtgggggcgactctggagcatgtgtagtaagaaaagaaaatctattcttcagtctgtccagagccatgaactccatcttttgggaaatgctccttccctttctctgattgtaaggttctaattgagccgctgagagctccctgtatctcccactttcccatacagcaggataggttaatgaatgacactcagagttggggagagaaagtggctgaatgtatgccacagggctcagatagctttgggtttaaatcctggctccctcacctaccatctgtaagaggctggccatgtcacatttcctcatccttgaaatgggggagaaactgactttgtagggttgatacgatttaaaaggacagttgaataaaattaatttttacatgtttccccaaccttgacactgtaaaaacctttttttttttatccagttgaatgtggaaaccagtctctagagcttgtctattttttactcttatttttctcaactcgtacgccactctctagagccctgtagctcttttatgcccatcttcacatttgcttttccttctgtgtggcgtaggcagacttctgtaaatgaaatccttatgaaaaatgtggaccctattgggtcctactcatctttggttagttttagttaggaaattgcagcttcaagttagaaaaactactcaaactaggaaggtgcatttgttatagctgaagtccagaaatgggctgggaagatggttcagtcattaattagtgtgcttgccatgaaagcttcctcttcccataaaaagctgggtactggtggcacatgcctttaatcccagcattcagggaggcagaggcaggtgtatctctgtgagttcaaggccatcctgtctacagagtgacttccaggacagccagagctacacacagaaaccctgtctcgtaaaacaaaacaaaacaaaatctgggcataatagcacacatctgtaattccagtgctgggaggcaaagactgtctagctaaattgtgagttccaggtcaagaaactctatctcaaaaaataaggtgggggacgctgaaggtggcttacaggttaagaatacgagctgtttttccagaggaacctgattggattttcagcacctgtatggtggctagcaaccatctgtaactccagttccaggggatctgatgccctcttctagtgtctgagggcactgaccacatatagggcacagacacgcaaggagacaaaatacccacacatataaaatagaaataaaataaatcttttaaaaaaggttcttctacagtgtaagtggtccgaggtgacctgtgaaatggtctgagaccctcttttttttttttttttttcttttttggtttttcaagacagggtttctctgtgtagctttggagcctatcctggcactctctctggagactaggctggcctcgaactcacagagatccacctgcctctgcctcccaaaggcgtgcgccaccaacacccgacttggtctgataccctcttaaccaaggaaacactacaaactcaggcaaatcaagtagttcaaacttccatgcatatgacaagaatacctgtaaaactgcccaagcaggtggtcaatgtaatgcatatttgaaaagccacctagtctgaaagatgtcacttaaagaagcaacctgtgtcattctgtcagtataatggtagaactgggtggtgtgtcaaggccaaacactatgtctggacatgatggcctgaaaaaggtgttgagcttttttctggacatgcttaaaaatgcagacagtaataatgaacttaactatttgaatgtggattctctagtctttgaacacacccagatgaacaaagtacctaagatgcagtcctgaatttacagagctcacggacagatgaacccatacacgagtttctagaacaaagagttcccaagcaagaagaaaagatatcctagaagaaatgaaaacctacagtatgggaataaatacagcgtaaaagctagggagagatggcagagaatacccatgtcaacttttgtacacacacacacacacacatacacacacacacacacacacacacacacacacacacacacacacacgtaacaccaccaccaagtaaaaagttcagaagtgagtgtatcttctgaacagtttctttaggtttttggctcaatttttcagaaatgttttctaggttctgtcttccaaaacttctacatcttgtcttttgactgctgtctctcatgataactgagaaaaaaaattctcttgcgatggtaggtattgttagacccccagaaaaactcaggtatctggggtcccaggccatgaccccggtcaccccaatcaccaggcagattcgagagcttgatgcaaactgcatgaggctttattgttttttaatgagctaaccccatgttagctcgggtctttcacccacccgccatggcagatggctacctagagatcttgtagggcagcttaaggggagtgtataggggtacacacaggctcaggattggtgtgcctccaggcttggagggtttgccctgtgttgattggccaactggttgttatggcccatagccctccagggtggttgctatgctctgcaagtcataaagtacacctagagtcgtaaagcatagcgccactagctaacttctgattggttccttgtcacgaggcaggcacctaacctctagtgaccaaggcaaggtcatagcgagcgcgtgttactgtcatggctgccaaaatggggggctggtcatttcagtatcatagtagactatgctatccaggaaaaaaaaagaatatctcttcttcactcatcccttttattgagcaactaccctgttttttttgtttgtttttagtttttatttatttattttgagacatggtttctctatatagccctgactgttctggaactcactatgtacaccaggctggcttcaaactcacagagatccacctgcctcttgaaggaaccggcttcccttttggcagccataatggtcgaacatgggcttctatgaccttgacctagacactagaaagtcagatgcctgtctcgcgacaaggagccaatcagaaattacctggtggcgctatgctttacgaccctgggtgtgctttatggacaagcgcacagcaatgacgtagagagcatagcaaccaccctgggagggcctatgagccataacaaccagttgaccaatcaacacagggcaagccctccaagcctggaagcacaccaatcatgagcctgtgcgtaagcctgtgcgtacccctagacactccccttacgctgccctataagatcttttgggagcccgtaggagccgtcttttgctagccggccgccatggtgggtgggtgaaagacccgaggtaacatagggttagctcgttaaattacaataaagcctcgtgcagtttgcagcaagctctcgaatccgcctggtgattggggtgaccgcgaacgtggcctgggaccccgaatacttgagttttcgggggtctaacactctgactcccaagtgctttgatcaaaggtgagcaacaccacctcctggccctgccctgggtttttaatagtttaggaagactggagatccggttcagcaattaagcacttgttgcccctgaagaggatctgagttcatttcccagtacccacaaggtgtctcacaactatatgtaactccagttccagtggatctgatgccctcttctgaccccttcagacaccaggcatgtatgtagttgtacatatatacatacagtcaaaatactcataaacataaagcaagtgttaaaaaataattagggaggacatatcatattcattaagcatgtggactctaaaattggactccatcattttctagctgtatgattttgggaaagttaacttctttcatgactgcttgctcctctatggggattttaatagtacatatttcataaggctgttagggagattatataagcttgaaaagcagtcagttcactgcctggcaactagttagtgctctataactgttagctagtgttgccagcatatttccttagaaacatcttccttcaaattctcatcttattagattgttttaggcattaatgtctttttgacatttcttggttgaatttgttatagtcaaccataaaacaaacattaaatgagggggtctactattttatgcactgaagagcaaataaaacagacaacgtcctgtccttatgttgatcatactgtgtggaaagtggggtgtagcagagagaccataagcaaatatacagatttcaggtggaacattgctatggagaagaatccatggagaaagggtgtaagtagtgaagggctgctatctaaaatgtggacaggtaagacttttatgtgtgtgtgtatgtatgtatgtaattatatacttctttaaagatagaatttcagtatagccttggctggttttaagagttggtatgtagaccaggctggccctaagctcccagagatctgccctgcccaggtgtggggactaaaggcatgctccaccactcctgtccatgtaagacttctttttagaaagcctgaagatggctgtccatagtggtgtacaccttaatcccagcactcaagaggcagagaaatctctgggagtttgaggccagcctgacctacatagtgagttacaggataattagagagctacatggaaagatcttatcaccaaaaaaaaacttaaaaaaatacctaaaaaaaaaaaggaagaagaaagttaaaaaaaaaaaagaaactgttaagatggcgaggagtgaacttgtggtggtatcttgcttgtacaaataaagcctgtctggaggtcagagaatggagcttgccactagctaaccatagaggtctggagctctgtacatacagacaggaagtgaggtagctggacagaaacaggatgtaagcagggagaaacaggaaatctgttgtcttgtctgctggatgctaaggaggtaaggtatgctgtggcttgctccttctctgatctctcagcacttccctctgtatctgactcccgcctttttattatctagaccatttacatgagccaatcaatatctaggagaagactatttgaggccaacacaacagcaaaggcaaaggcccagaaggagcagtatgttagaccaggaaaaagaccataatgtagctagagcaaaacagcagactgaaacttacaccatgtcagaaagggtaaccagtgataagttacacaggacatggaagaacgtgaacaggattgttgtgcaatttttttcataatggaagccatgaacagagtagggcaacagctgcaacttgcctagtagtggggttgagagatcagaagaggtggctcctgagttgagtattagatgaactggaggtatctggagagaagtggaaaagtgaaaatgccacaacacaaggtgttaagggtggtggcggtggcgcacacctatgatcccgggagagagagagagagtcagagagagagagagagagagagagagagagagagagagagagagagagcgtgtgtgtgtgtgtgtgtgtgtgtgtgtgtagaagcaggatctctaaggccagcctggtctacaaactgagttgcaggttagccagggctacagagaaacccatttcaaacaaacaaacaaaaacaaaacagacaggtacattcaagcaaatatggtaagactagtgcacagagaaggaagaaaaagtaggctggaccgatggatagaagtgtttattgaacactagacatttcttacttcatctgtgacaggcattgtacaggttcggggaacgcagtaatattaaaaattatcagtaaagaattcctggtcttggcgctggagagatggtttagtggcgaagagtggttgttctgcaaggctgagaacctgtttggatcatccattctccacctaaaacggcctggcatcgctgtgattccagcaggtagaggcaggaggatcaacatcatttttggctacagagcaagttcagtgccagccttagctacatgagtccctgcctcgaacaaatcacaggtctgcagggatggggaatccagtcttctgggagctcagtagttagagcaggcaatggtcctgcttgtgctcccagacctctgattgtctggagaggccagagtgtggatgtggatgggagactgaaacattgattcgaacgggagatcctgacacaagaactatttaagagggagaaccaacacccaggttaagtaagaaaacatttcatctcgtatgggcaaaacaactcgactaagcttcttttatattccctttgaggaacggcacccagaccccgggacacgaagcctctccgcccaaccctagtcttggcagagtggcagcactctcactcttaattcctagaaagtgaaataaccgggctccaattacttcagggccctgcccgcatcgcccacggctaacccgcgggggccccatctccaggcctcgcccactcaagcaccaccccgtcgctcctccttccggctcctgctcagggtttacctcacaccccctccagctcgctctgcctccaggcccgcccccttcaggcccgcggcaacctcgcgtcttctgggtttctcttagcaccgcctccgcgtccctaggcccccgcccggccctaagtcccctcctctgggcacgctctcccgtnnnnnnnnnnnnnnnnnnnnnnnnnnnnnnnnnnnnnnnnnnnnnnnnnnnnnnnnnnnnnnnnnnnnnnnnnnnnnnnnnnnnnnnnnnnnnnnnnnnnnnnnnnnnnnnnnnnnnnnnnnnnnnnnnnnnnnnnnnnnnnnnnnnnnnnnnnnnnnnnnnnnnnnnnnnnnnnnnnnnnnnnnnnnnnnnnnnnnnnnnnnnnnnnnnnnnnnnnnnnnnnnnnnnnnnnnnnnnnnnnnnnnnnnnnnnnnnnnnnnnnnnnnnnnnnnnnnnnnnnnnnnnnnnnnnnnnnnnnnnnnnnnnnnnnnnnnnnnnnnnnnnnnnnnnnnnnnnnnnnnnnnnnnnnnnnnnnnnnnnnnnnnnnnnnnnnnnnnnnnnnnnnnnnnnnnnnnnnnnnnnnnnnnnnnnnnnnnnnnnnnnnnnnnnnnnnnnnnnnnnnnnnnnnnnnnnnnnnnnnnnnnnnnnnnnnnnnnnnnnnnnnnnnnnnnnnnnnnnnnnnnnnnnnnnnnnnnnnnnnnnnnnnnnnnnnnnnnnnnnnnnnnnnnnnnnnnnnnnnnnnnnnnnnnnnnnnnnnnnnnnnnnnnnnnnnnnnnnnnnnnnnnnnnnnnnnnnnnnnnnnnnnnnnnnnnnnnnnnnnnnnnnnnnnnnnnnnnnnnnnnnnnnnnnnnnnnnnnnnnnnnnnnnnnnnnnnnnnnnnnnnnnnnnnnnnnnnnnnnnnnnnnnnnnnnnnnnnnnnnnnnnnnnnnnnnnnnnnnnnnnnnnnnnnnnnnnnnnnnnnnnnnnnnnnnnnnnnnnnnnnnnnnnnnnnnnnnnnnnnnnnnnnnnnnnnnnnnnnnnnnnnnnnnnnnnnnnnnnnnnnnnnnnnnnnnnnnnnnnnnnnnnnnnnnnnnnnnnnnnnnnnnnnnnnnnnnnnnnnnnnnnnnnnnnnnnnnnnnnnnnnnnnnnnnnnnnnnnnnnnnnnnnnnnnnnnnnnnnnggctttccagtccgggccagctcttggtgttctcttaggcgcacagatttggtgtccccccctctccgcccccccagtggttttatcgccttcctcgccacccttgccaatcctttggtcgttgtcacctggggcgccggaggggccaccagccctggaactggtctcacactttgtttctgtcctcttagcggccgagcctcagttttctcctgggtgaaatggggtcaagaaggaacgcagcctcgcagggtgttagtgtattcagggagggagttagtacatgacagaagcgttacatgccaacaggtcacgttcaattagactgacccaggaacttcgtgaatgtatcgcctaatgtccacagctgaattccagagttgtccctactcaaagcagcagaaatccagttgcagagaaatgaaatagccgtagaagtgcaaagctgttagtaacttacttatttcctgatatgaacatgtgtcatctcttgttcagagggcattttgatttaccgttaggattaacatcatatagttaagaagaaacgtaactccgggttcctccctgagacattgacctatctgccacagataaaatccccctttgttgctatcagaactctgagggaaaggtgattaggattaatttgttttgcttggtggtgtggttagaggcatccagagatctccaagcctccaatctaaatgaagttctgagcttaaggacctcaccaaagtccaccttctgctttattgcatgtctctctcttctcccaaccgcaaatcttgtattctccatgttcgtagttggaaggtcaggggtgtaggtagctcaagttaactgcctcaactccctgccttcaaatagtgttattctttgtttcccagtgaggcctagaggggttaaagtgaactaaaatgaactttggcaattgttttctgtggtcagtatgatattggttgtggggatcatctgagaaatcagacagggccaggtcttgaggctctcatgtttgcattagtttttcaacctgtaggtctgctgtgctttcatccttaagattctagatttggtagtggtggaatatacgagtggatggctcaatagaccatcccttctttgcttttaactgatccttgaaaggggcaggttgtctaaaccttggtgattactagaattcttggtagcctttcagtctagtgtcatcccccccctcccccagtttgttgaatatgatctactttttcagtcctcaagatcaggagtctcaaaagaccttgtgtagtctcagccactttctgtgcccccatgtctaaagagcaggtgtctgtattttaaattaacacatttgttttagtttcctaaacaaatggtttaggtactctcctgatttctaatttattgtgaagtagtttgcagggcttgatttatgcctttgtagtgtcaggcagtagagacagattaggaaggacttttgctttaggatcacaggatttaaccagcgttgacttctacaaggagctgagccattcctttgagtggccctttgagtctggtttttccagacacggttttcctgtgtagctttggagcctgtcctggaactcactctgtataccaggctggtctccaactcacaaagatccacctgcctctgcctcccaagtgctggcaagtctgttttcttatgtgtaaagtctcatagggtgctgtggagacaagaaaatgattgtgaaaatgcttgttgcagtaataatagctaacatctattaatcagtcgtaggactgaagatcatctattaatcagtcataggactgaagatttttagtggactatgtcatttgatacttggaacaatatgaactaagtattatccctgctttacagaagaaactgggcttaaagaaagattacatcaattggccaagctggattcactctgcagacagtaacagtaaaatcagattctttgagaagttgtggtgccatccatgtatgtcatattttaaatagttggcaatgcaacagttttacagtgtgcaattctatgggaataagtatattttatattgttgtacagctgatatctccaaattaccttacctttcctaactgaaattctcctggtcaaacacttttaacttcttgttgaagattcttggcaaaccattctgttttctgctgtaaatttgactactctagaaccttcacggtgaagtgaaataattcaatctttgtccttgccaaagctagcattacctgccttcatttcagttttcggtaaatgcagaatgatatactagttatcatctgtggcagagaatgacatccctagatcaggaatccaggcctggttgtgtctctgacaaaagcccccttctccacactacagttgaagttgattgctgaaaccagttagggaattacactagcccctgtattttcagagggagaccttccttctacccttgaaccagaacccagactactccatggtctctgtgcatgcttgtttggccattcagggtctgggtatacagctgtagtgatcaggaatagcagactatgacagcagcttgaattaaatttgtcagctgattaggtggattaattacctcaatgacaagctccttttttgtgtctctccttccataaaggcacacagaaaggattagagtttggagtctggagtcttagatgatcttagatgattcttactgctgtaggtggttagggtgaggttagggttacattgagcttttcaaaattcactttagttaatctgtttctgtgtcttgtagtgagatttttatttatgcaagttggttggaattttgttctgatagtaatgtggctgttccagagatggggactaggacaacgaacatggttatgttgtgctctctaaaaatctgatagcccacattgcctatatactaaagtcagtgtgttgaatagtatgtttggtaaactgccatttttcctttttttttgtgatgcttgagattgaacatggatttgtttttattttatgtgtatgggtgttgggtctgcatatgtgtctgtataccaagtgtatgcagtgcccaaggaggccagaagatgatgtcagattccctagacaactggagtttcagatagttgtgagctgccatgtgggtggtgggagttgaacccaggtcctctgaagaatagctagtgctcttaaccattgagccttttccagaccttggatagaccttggataggtctgcatggctatttagaccagacttctttttagcattccagataactacttgtttcagtggacacatcattattggaaaatgttttcatttactgaattaaaacttttttttttttttttttttgaggaagggttttactatatagctaagactgtcttagaacttggggtacttctcctcagcttggagttacaagaaggatcactgatgatgccaggcttcatagaccagttttaaggcatttactaaacatactacgaggctcgaggatttgggtatatttaatcaggcaaagaagcaggcatatgaaaagttgtgactaggccaggaccttgaaagcatagacagatgacgtctaacctagcattgttgggtcaagagggcatccttgaatttggctaggcctaaacataagccaggaaaatgaaatttgggaagccacagtagaggcagagacaggactattcaaggcagaaagaactgtaattggagcattggtaatgatgttatatgagacttttgtttacttattgtattaggtacagttgtaggcatttaacatttgttagcttcttctctgagaggtagctaaaagtattgccatcctgtaggtgaggaaagcatcttgggaattaaatgaatttctcaagattctcaggtcaagtgtaaagcctcagctgagtggatgtggtgataacagaattggcaaggtagggagaatagaagtcagctcacagaagggtactgttgaccctgtgaaggactttggaccgtatcttgaggtaagggggtctatggtctatgagtttgcatcatttggaggctatctctggtaatattctaggggaatagactgagagctagagcactactggtagagaccagttagccaggtgcagtatcattggcccaagattctggtgtttcaggtgacagaaatcacagagtatgtatacatgaaaaaagggaaccaaataagattgttggaatggagaatatggaaagaagcacattttaatctatcatatagaagagtttggggtgtgtgtgtatgtgtgtgatttgtttctctatgtaatagctctggctgtcctggaactcactctgtagaccaggttgaccttgaactcacagagatccacctgcctctgtctccctagtgctgggattataggcatgtgctaccagtgtccggctagatgaggttttaagtgggaaccaaaacagggaatatagaagggaagggtgagaatttatctgctttcattaatctctgttatagataccagttctgtatcagagctggggacattggtgaagggaggtgggggttagtttgacttcaaaacctaatttggctaaaccagcagttctcaacctgtgggtcatgaccatcagaaatatgtcttaggaactgagacaccactagaagcaaaattagttatgaagtagcaacgaaaataattttatggttgggatcaccacagtatgaggaactgtattaaagggtcaaagtgttaccaaggttgagaacagctggcctaaactgagtgatgcaaactttggaaaaatatttccctttggaaagggaaatattagttgctaggcatgtgggttctgtacagctgcaaaggaagactgcttttgttaagccaggataatcttgtattttctctagtcggcgtcttgtaacactcgtgttccagtgtgccgctctgtaagtattgtcaccttagctaggcaccagaaaaccaaaatatgagtaaaggagcccagggaagtccctttctagaagagcaacagatcttagtgactttgatagaacaacagggtggagaaaggagagggttgtgggattgagcaggacaggacagggtgggattgcattggggactgtttttattagggataggagtctatcctaatagacctgttttccagatttcctattaggtggcaaatgttcaggtttgttcatctgaataactaagatcccttctagcagtaacattttatgactaaataatttagacactatatctccaggagaggtatttcccttccagacatcttaggcagtcttaggggttaggtaggggaggaaagatagcaagagggctttcacatgagtgctttgtgttaaggagagaaaaggaaaatttgagatctttgttcaggatagatagttagggcagagagagtcgtaaattggatgattagtagcctgaggattatctggtctgtttctttgatcctaagtgggttggctagaacaggctatttttattcactgatgttgttttcttcataaagtaatctaggaggttcctgagagtctataaaagcccaaagactagagataggaagtggtgacagaacaagattggaggtcccttcctactctccctccctcttttcccttaggtaaatacacaggactatgcccaggcaccattgttaacttttctcattgtttccatggcacttcctttttcttccatgttaagtttcttgtcatttcataattgcttttgtagtaaaacatgtgaggtaccttttgggaggaaaaaaaaggaagatgagatgtggtccctttttttagtttccatttcttagaagaacacttggagctgtctactgtgtcctgctctggatggaagggtaagaagtcagggttgtggctgaatacataggtttcccagagggcgtgtgtatttggaatgttgagagttgatgaaagtgcaaatctagcagtcctgtcaccctgtctagtgagttccattaggtttaaaaacatatctgatgggcttttgatgctgtctgaactcagtgttagttggaattacttaggactgcaattttagtctttcttctgaaaaacaaggtgatagtactagataatcttttaattttgttatttactattgtgggtatatataggagtatgatgtatgtgtgtcagttggtgtgtctgtgtcatgctcgagtgtggtgtttttttttttttgttgttgttgttttttgagacagggtttctctgtagctttggagcctatcctggcactcactctggagaccaggctggcctcgaacccacagagacccgcctgcctctgcctcctgagtgctgggattaaaggcatgtgccaacaacgcctggcccaagtttggtggtcttttgggagttgattctttccttttaccctgggttctgaggatccgaccatgtcatcaggctttgcattgcaggtactttgacttgctaagccatctagctgaatctggaataggatctccccccaccccacccccccaacagtatttcctctgtgtagctttggctgtcctgtaacccgaagagatcttaatctcctggatgctgggattaaaggtgtttgccaccactgcctggcttgcaatagataatctttttttttttttaatttttaaaatttatttagcatgtatacagtattctgcctgtgtttctcttcatgccagaagagggcatcagatctcattacagatggttgtgagccaccatgtggttgctgggaattgaactcaggacctttgtaacaacagccagtgcttttaacctctgagccatctctccagcccagaatagataatcttaaatgttgtttctactacagttttatggaagtggcttaagaatttttctctggaaggagaaaggggtttacctaaagcattaaatatctcagggttaaattctggggtcatcaaataaaccttttactatataaaccgatggatattgcttttaaagagtagacaaattgctgaagaaaatcctaggttaatttaccaaattatctgctgagtttcattataatcttggagctgaagccctgtgggcaaacttgggagcctaagactatatggaacattaaatttaaatatgtgacagactgtctgaaaaatcacataatgaaagtagaaacagtaggagtggaaaatactagctccaaaacatttcttgttgttgtttttgtttttttttgtttttttttttgtttttgagacagggtctctgcagctctggctgtcctggaccttactaggcagagtgctgtcctctaactcacagttccatttgcctctatctcctcagtgctgggattaaaggtgtgtgcagccatgcctagcccccaagcaaagagtttttgcagagcttttagccttatgacgtaagtacccttatttcaagacacctggtccttgaaatggcatctatagagaataagtagttcagtttgtcaagccaagaatgattgctttactccaaatacatattctcttttagaaggccaagttgagcagcctaatgtttttggccaggctttcttcatcctggagacatttatttggtatttagctgtctcttgtttattgaagattttggtaagcttagttaaaggtgatgtttgcatggcttctcttcatctgtttgtctagtttgctttataattctttgtgctagtgaaagcaagcccggcagtagatttaaaagggtcatttctgtaactcatcgttttgtaggtctaggtttcccttgtgttgggtctgatcacgctatactgggaagtcaaatgttgcctgttccccctaacagaccattttcaggctttggactttgttcttctagataactgtaggctaccactgaggaatggtgctgtcaatataatgagggatgtgcatgagtcattggaacacaagagtaacttttcttaaaaccttataatctcaccttaaattaatttttcaaatcaattaaaatagcctttttatagttagggttgtaaatgaggttagtgttaccttgatggtgtaatacaattacgtttggaacagcctatcttccatccctgtgctcatctggtcattgcggcaatttgtgtgcctactgtgtattctccttgtagaatttctatctgcagttatttttcaatactggagggaaacaggtaaacaaatcagggtagctagatggcttactggataaggaaatttaccgctgagcctgatgacccaagtttgattcctgggatccacatgtggtaaagagccaacccctgcagattgtcctttgacctccacatgagctttatggtgagaacactgtgcacacactccctaaataaaactgaaaacaatggccatttgtattccattcctacccattcctacctgtgcttctcttggcccagatacctgagttgtgagttcatactggcattagcataattgatgctaataattcatagcataccactatgaaagaaggctttggttgtctgacttctaatgtattgatctgtttttggtattttcttcccttctccttttcttctgcatgctatccagttgttgatctttcctgtccaatgtgcccggtccctagcaagtaaagtcaagaacattagtgtaagggagaacactgatcttgttgaaggtgcagccatccacctagcaccttctctaattcttatatcacttctttggctgacttccagaaagatctttcagagataagattaagaagaaataaggcccggctgttggtggcacacacctttaatcccagcacttggaaggcagaggcaggcagatctctgagttcgagaccagcctggtcagccaggacagcccccaaagccacagagaaaccctgtcttggggggagggggagaaagaataaggagaaataagtttcatattgaattactactttcttttgatataaataagtctctgttttgcttgcagtagatatttgagttgtgttttttggaattcgatcaatttgtagtttgctgattctcaaagctcatcactgtgactgccttctttaagtgctttgctgcattgagtcctaaaaaatggaaatagaaatgaagggaacatggaggtttccttcatcttgaagaactcctttctcttaagggagaaaagtcacttagggtaatttattgtggtcatgatttttttcaacaatttagccttgcctgaggggtttaaaggactaagtgggttcttgagatagttcagtgggtaactgtacaagcctggtatcctaaattccattgccatcatgtaaaggtttaaggagagaaccagcttctagaactctctctcccctccctgtcccccccccccagccccctccagagatggcttagtggctaagaatactgttgttcttatagaagaccaggtttgattcccagcacccacatgtggttcacagctgtctgtaaatccagttccaggggattcagtgccctcttttggccttttcgggcaccagcatgaaagtggtacacaagcatgcaggcaaaatactcataaaatacaataataaaataattaaaaaattaatatttaaaatactttttttttccaaaaaagattaagaagtatgcctttgccaacccttgaagattagggataatgttaagggagagggccaaactagagcctattgttgaggtgctctttggtcttcagtgatgttatattctctgtgggggagataaaaaagctgataatgaggtaggtagtgtattgggcagtgaaacttgggacaggaagctctactcttttatggcactagcaaactggagaaataatttttccttactgagcttcactttctcatttataagatggggttaatattctgtatcttgctttccttaccatgtaaggggaaaattagctaatgttactaaaagtacacaaagtaaaatggtgaggcagttttacttcatgagtcatttgtcagaagtaataggtaactggcaagggtttccataggaagggaagtctttgggctgcagtggtgagcaagagtatctgagccagtctctagaatcaagagacatcccttgaatgtctgagctggtttggtcttgtagtataaggatagtaactattgtttgagttgttcctcatttctaatattctgactgatttctgcttacaattgattaaatgccagtatttctgtttctggactatattacccagactccacccagaagcaacatgcaaacaccttttctcagttaaaggaaatcctttctttccttctacttttacagtttctattcatcacccaggaagtcagggcaggaacctgaaggcaggaactgatgcagaggccacagaggaacttatcagcttgctcccattgacttgctcatcccgatttcttttctgctttttagttccaggagagctagggctacacaaagagaaacactgtctcaaaaatccaaaaatatatattatgttttgtgtatgactgttttgcttgcgtgtatatgtatgtgcactatgtgtattcatggagatcagaagagagtaaaggactttcagatggttatggaccacgtgtgttcagaggatctgaatatagattctctgcaagaataacaagtgcttttttttaactgctgagccatctctccagccccaagcctgctttcttacctatctaggaccacctgcacagagtagcatcacccagtgagctgggccctctttcatcagtcattaatcaagactgcctataggtccgtgtagatattttctcagttaagattccttatgtattaaagggttcattttcttttaaagctgaggaggaaaggaaacactgacacctaaagactccagtctctcagctcacctattacttgtgtatttgctcagggaaaaatgaccatttctttgttagcttttatcctgccagtggaaccttgctgggtgtttattttctgtagttttaccaaatcactttgaaggctggcatgaacatagatcatgtcttagagcctttcttctttgttctataagcaaatattagaaaatgtaccttaaattaacctggttgggggaaataaatggtcctggttgttccctaatggtaaacattagtcagctcttgagtctgtgtctgtagggcgtttgttaaaagaatctgggggtgttggagcttccactagagacattgatcagagggctattaggctcctggtcaattcgaatatttgttggaaaagatctggcctgggttctgaatctgccctcattttaatagctgcagtgaattatgtgtctgttttgtaattatgccatatgtggtaccatgtatttgtgttagtagagctgatactcaaagctatgtgctaagttttaaaaatctttttagatctactacagtctttagaggtagattctattgagtcctataaacctctctctctctctctctctctctctctctctctctctctcacacacacacagtgtgtgtgtgtgtgtgtgagagagagagagagagagagaggtagagaggtagagagagagagagagtgtttctgtgaccataaatatagctagggaaacctagtaaataaaaaacaaatgtttttctagcaataaaccttcctgggattgagttactatttcatgggtaactaatctcttgctgggcaaaggtgtttttgcttttgtggaaatattgaagaaatccagaggcagtagaataatggagtgccatcctgcttcaagggatagcaaacatttaggtgggacagtgttgactcccagtggcatctcatgaggacagttttgttattttgcaaagaaaagaaaattttagttgtgaactacagagaagcagcccctttgagagaaaacagttcctttaacgttggggacaaccaagtgttttctcttctagatctcttcacagcatcttattctctagatcagagatgaaaaactggcagctgctgggttggtaggccctgagtacatgttgtctttgacctgaggtgttttatttggagttagaccctgagatagccctgctatgtgtgttacaagagtgactggtaacatgtgaagagagattttgttgttgttagtatacaaagtaatgaatgggtttcattatttcatttccatacatatgttgtaatttattcttttatttttattttattttattttatttttttcgagacagggtttctctgtgtagttttaggagtaatttattcttatcccactttcctactgcctttccttatgctctctgccctccttttactggtccttgtcctttccccaaaatccccatttcttctttcttctctcccctgtctctttccagtcccttccagtaagatctcttggtttttctacttttaacacacacacacacacacacacacacacacacacacacacacaccctccctacctctctgtctttatataagataaaatgtggttatttcactcacttatccaaacgtaatgctctccagttgtagccattttttactgcaaatgttatgattttgcctttcttttgtgactgaataaaattctattgtatggccaggcggtggagtggaggtgcacactctgaatcacttggcagaggcaagtgggtctcggtgagttcgagaccatcatggtctacaaaatgagttccagaacagccaggactgttacacagagaaaccctgtcttgaaaaacaaaacaagacaaacaaattaagaaaaattccattgtgtgtatgtagcacattttctttatccatctatcagtagttaggctagttccatttcctggctaattttagttgttcaccaataaacatggatgctcaagtatctttgtattatgttaactttgggtgcatatctaagagtgatatagcttggtggttctatttttaagttttttttctacccctatggaacctccatgctgactctttgtcaattattattattggaacctttcaggaagtcattgtctctgcccatatcttgaagtcaaactatgtttttagagctggaatttgttcgaacacggcacctacagaggatctattggagctggagttgcataccctggggagctgtctgatacataggtgctgggatagagagtagcaggggctggtgtctgatatgaaccataaacagttctagttacaatagtgggtctaggccctggctgttcttcagaagggttcattcctttgatcctccaccaggcttcctgtcttgtgattctttattaccttgcctgtgtatattttcacatggcttttttgggaccctgtgactgtgttctttgggaaatcttctgcagcatcaccctaacatggaagaatccttgaatttacaactaacaatcttcatatttcttcttaatgcttccatatgggtaagcttctttagatagtaatgtatttgttctcaagtttgttagagccacactcaactacttgtctcattgataaccaagctgtgtatcagttgctctttttgtttttcttccttttatctttgaaacttggtggattcattttgttacccgtttgacctctgatttgctttattgccaaggataatcctgaactttttatttttttcttgcctctactaagtgcaaagctaggattatgggtgtgtctgcctgaactctttaacattaaagagacttcagctaggtgtcgtgctgctgaatctcctgagcgtaaatgaggtctctttattttatgaggaaccttcagctgccactattgactagtcagtttgtgtcctgacctgtcataagacttggcaaaaaatagcaaattagccaaggcttagtaggtcttatctttgttaaagttgcatttcttatccctaatatttgtaaactgggtgtgtatagtggtggaagtaggactgatgccatgattaaagctggttttcttaggagttagtaccttgttctttttctcgtagttgcaaatcctatttgtgaaaagtaggcatcttctgcgcaagagccttcttgaagttattgtaacatggtcattgtaggtacctgacaaaaaggctgtcaatatgtgtgtgtaactcagaaggtatttaagttcttacgatgctagtttctcagattgaggcacatgattgcatgtgggaagtatgtaaaatcacaacatacccaaagtgtcgatgcatttggatttcttttgtgatttagaactggcaattttaaagttcttttttgaaacagaatctcttttgcatagccctggctgtcctagaacagaccaggctggccttgaactcacagagatccacttgtctctgcctcttggcttttggtattataggcatgctccagtatgcccagctaaagtttgctcttaatatcaatcacacagaaagggatctgtgtgtgtgttgctgaggatctgacttaaggcctgatcatgctttatcatgctttgtcactgaaccaaacaagcccctaccccattcctaaattgtatgagtggacaataaattggtgtgcattttttaaaaaatgcatgtgtatgtgcacacacatgtacgccttgtatatatgaggttgcatgcatgctatagatttatgtggaaacagtcagtttccttctactgggtgtacagggtttcagagaggtgtggtgacaaacacctagtcactgagctgccaccagcctaagaaagatgtggttttttgttttaaggttaaatgagaagacatcaaagaaacagtagattatagaaagccttctgatcttccagtggatctaatgttactagatcttgacaattaaaagaatagttggaaaaaattttaaaagaacagtctgaatagctctagttggcctggaattccctgtgtagatcaagggtggctttgaactcacacagatccacctccagtgtctgttcctgagtactggaattaaaagagtgttttaccttgctgcctaattttaaaaagcatgatctaatttttaacattggcaactaatctgggatttttaaactggatttgtatggatcagacataccttttttagtgacctataaaatatattactggtctgggaaggaagtagactttggacatggctaaataggtaatggtgtcagaaatggcaggcaattactggaaccctcggccagaagcctggctctggctttgaacacttgcccccacaaagagaaaaatgacataaaacttataaaagacaaaaaaaaaatgtacagttttgttgcaaactggagacaaagccattctcaacttaatctgttttccccagacaaatttctaaattttatagaaaagataaagccaggaaataggcttatgtagatttatgtggttctcattgagttgaagggggacaggtgtcagtcactagagttctaattctatttggttttcgtgtaacctactcagggcttctgagcaggctgtctctgctgtcagcgtcatgtttcttacagggagccggggctgagaaagccaattaacatttttttctttttagttttgaatgagttccattatagaaggaagctaagagacttgataagttaggacagattgttacattaaacgtcaccctcttgcaggctgtcctcgcttcttgtgcatgcagtgacacttcttcctaagccccacatcccacactccttacactgaggtgcaactattctcttccttgatttttgtctatcttcctaccttttttttctcactgtttaaggaatttttattaaagcaagaattttataatccaaattatgttttccttgctcagtccatcagttatacaagttgaaacagaactgatatcccaagctattccacagtaaagaattacaaaattaaagaaaggaatgctttaaatttttatactttgctgaaaattcttttcccagggtctataaaacattaatttgtttttatattttactattttttttgtattttttgttattttaaatcaagtaatcaggactagcattgtttgctagagctggcatttgcttggtacttaaggttcaaagtttcctttccttttttatttattttatattttgcaatgttttttcataatatttaaatttttcgatttttagatattttttccttcggtgaagcacgagtttcttttcgtggtccctgataaatttaaacagatggaactccagcggcactgttcagatgtttagatatttttttctccggtgaagcacgagtttcttttcgtggtccctgatcagtttaaacagatggaactccagcggcactgttcactgccttctgggcagcctcttttgcttggtgggcctgtagtacagctatagcttcatcaacctttgagcggagagactcgggagactcaagcatgtgcagtagttctgggttatcaatctccaacagcatgccagtgattttaccagccagagtggggtgcatggcttgaataagaggaaacaaccattcacccaacatttgcttttgctcttgaggaggggcagatgccaacatggaagcagttaaaggttcttgaccttgcacatgaacagcaggctgttgcatggtaacttgtggctgtgcattaagttgttgctgggggttgtggactcccgcagcatatttatactggggaacggtggggacagcaggcgtggctgcagcagcagcagctacaggacgtggacccatggtccgtgttgaagtgttagcaacatgctatgttgacatgactcatggaacctgtgaggatgctggtctcatagtactaaatggtggtctaggagcagctgggcggatagcaccgggcatattctggaatggatgaggtctggcaccctgagcagtccagcgaggacttgctcttagttgagcaatttggctaggaggatagtatgcagcacggttctgagtctgtgggatggctgccatgaagtaacctgaaggaggtgctggctggtaggggttgatcacagggttgggcacagcttgcacacttgccattctctgcatatgctggttagtaaggtgagcctggcgctcttctttgcgctgagctaaagctacatagaatggctttgtggccacaattctgccattcatttccgtaactgctttagtggcttcttcaggagatgagaaacacaaaaccaaacgctttgctgcgaccaccctccatcataacctttgcactggtgattgtaccaaatggagaaaactcgttccggagacgttcatcatcaagatttttcacataaatgttaacaccctagtatctggtgatcctatcttgcttcatttgctcaaatttgcgcttaagctctgtctgttgttccatttttttctgagctcgaccaacataaatctgtttaccattgagttcctttccattcatctcatccacagctttctgtgcatcttcatgcttctcaaagcttacaaatccaaatcctttggattttccactttcatctgtcattactttcacatttaaggcaggcccaaacttgccgaagagatccttaaggcgctcgtcatccatgtcttctccaaagttcttgatgtaaatgttagtgaaatcctttgccctggctccaagctctgcttctcgttccttgcgagacttaaatcgtccaacaaacacttcggtcatttagaagcatcccattcattttctcaatagctctttctacagcttcctgtgtttcagagtgtacaaatccatagcctttggagccattttcatcacaaaccaccttacatgagaggatgtttccaaatgcagagactctaatatccttcatccattgtacctagcagactttttaaaattaaattttttttctccctgagataggatctcactttagccatcaatggcctggacctagcagacatttgaatttaaaaaaaattagggctttttgtttgtttgttttctttattttattttattagttcaaattgggaacaagcttgcctcagatgtcaatcccttctccctctccctcccctcccccccaacatcccatctgcccctagccattccccctctattccccaggcagggtgtaaggccctcaaaaggggctccccaaagtctaccacatcatcctgggccaggcctaggccctactccatgtgtccaggtcaagagagcatcccttcacaagggatgggctctcaaaatcccttgtttttttttaagaccttacatatttaatacagtgcgttacctctgtacaaatggaaaaaaaaattaagttcaacatttctagaccaatatggctgttaatttttgtacaatgccaactcaacacagtaaactgggatttgttttcttgttttgtttttctgtgtaacagctctggctgtcctggaactcactttgtagacccggttgaccttgaactcactgtgatccacctgcctctgcctcaagtgctggtactaaaggcatttgacaccactgcccggccaaaaactagtttttaaaagaaatgcctactgataacttagtggattgcttgtcatttatttagtagattgtggactatttgtgacatcttttggaaataaggtagaggaaacagaagattgggttagaatagcagttttcaacttgtgggttgtgacccctttggaagtccccttcgacaggggtgccatatcagatagcctgcatatcagatatttgcattcataattagcaaaattatagttaggaagtagcaacaaaaataattttatagttggggggggtcaccacaacatgagatgtttgggtcgaaacattaggaaggttgaaaactacagcactatgtagatcaggctggccttgaactcatatgcctgtacttcccaagtgctggaattaaattcattggccaccacagttgactgctttaggagtaatttaaccccccccccccaaatctcactagtctccagtgggcagggcatttcaagacattcaatagaggctgtctagagcctgacctgtcagaagtgttgcagtggttcctaattagaaatggatctatacgggcttgtagccagagctggggagactcttgattaccatgaaatggatctggtaattgttagcaccgtggttctgaaagtgtggtcctctcctgggatcagtggcaggcagcactgccctgaacaaattgtgaaaaggttggtgaacttgtgttctccattattttctcctcacttaataaaatcatgctagtgcctagttacagaccacttcctcagatagaagtcacttatttaatacttcataaatgttaaatactagggtaagctcttttgcatgtttatgtcttctaagttaccagagtaggttagaaaaggaaatggaagctgagagaagtgaaataataaatacttgactattcattgttacatagcatattgtctgtggtgatgaccaacattcgagacataattgtaattccaactactgaattactttgtttttttaaaaatcagggcccacctttaccctcataaatattcaattgaagatcaggtcctgtccttgtagcccttcaaagactggagaaatttcttttaaaaccagtggtaatatagttattagtggggagctctgcttgcttttgctttctcatttccttttcaaagtctaaggaatgagcaggctctaatgggagagatcagtcatcatttgggatcaatggaaggtcttttagagcgatgctgaattgaaggaggagaaaaggactgtggatatttctatgcattgagaacctgaaggcttagcatgttcagttacctatgttgtcagaccctgttactcctattgttggtcattcaacaaatattggatgagtgttgtcctatgtattaagacttttgctagtgctaaggattcctagataacttcacaatctagcatcatttagggaaggatgccaaccatagtagatggtgtgtgctctttaataggatcatgtataagcatgaaaatgggctttcctggggaacataaatgatttgtgctgttgttttttttttttttttttttgagataatctcatgtagtccaggttggccccaaactctcagtcctcctatcctacttgccaagttctgggataacaagagtatgctacctgttttgttttaggattttacttattttatgagcattggtgttttgtatgtgtgtctgtgtgagggaatcagattccctggaactggagttagatttgttagctgctatgtgggtatagggaattaaatgaggatcctctggaagaacagccagtcctcttaactgctgagccatctctccatccccatagctctcattctcattctctatcttctcccctttatcttccccctcccccctctttctcttttcctttttggaactcttcatgtagaccaggctgacctcgaactcacagatctgcctgtctctgctttctgagtgctgagatttaaaggtgtgtgctgccatgccaggctttacttgcgatttgaaggtaaagtgaagagttaaggtagggaaggaaccagcacaaacaaaagcataaagttatattcaagaacccagggtaaagaagtgcacattagagtagttcttcatatagcaaatcagattgagcccttgccctttgccacctttctactgtagcctttggatggcagtgatgtaggactataggtggtggaagaattagatctgtaaggaggtaccatttgaaatttctagaattctgtagagggaaggcggaaggaaactgaaaaccagcaatcttttggaccaagcctgccagaggtgctgagttcttcacagtgatttgaaaattctggcctgggcaaattggttggtttttctggcaaaatcccattggctccatatagtctgcccccccccatgctttttaaaaaagaaattaatgggatctgttcaaaatacttctgaaatgaaattacatttttaactctaattaccctaattaaaacttgacagccataatcctgaaatgacagatatagtaagtaccccaggcctgtgacaggctcatttacccagatgaaatgtcgttttgttttggcttaggaaaattcttttatttttcttatcagcagcttagtctttgctcccatagctttaccaagctaggggagctgtagtggtgggctacaggcttaccctggacataatctcagtagaggtgccatcaagatggttgttaccacatatatctaagtctttttcttcagttcaaattggacttaagcctttgaatgaaattctctgctttgaaggtgaaggaaatggcatttgttagaaacctgttgatctggggatagaccttgttcttgggtaagtttatgactagtattaagggcactttaaccatctgtggtgatgaacacctgtaaatccttgcactcaggaggctggtggcaagaagatcaccaattcaaggctagtcaagacctgtttgaaaggcaagcaaacaaaaccatcaacagtttgaggttaggaacaagaaagtctgaaaatagaagtcttttcatatatctccaattcctctaactttgtacaggcttgatggttgcctagtcttaactaattacttggctagccttaaaatatcttggggtgaggactaggtccaagtccatgaagctaactgaagaattggttgataccaagtcaagaattctagaatcagaagccttttaaagtcaatagacactggctgctatgttttatgctaattactagagagatagttgagtaagacacagtccctgatcctgagaaccttagaattgtggtgaggcagcaataggtaaggaatagtcattcatatatgacaaattattaagggcagaataaaccttattcagtgttagaaagtctcagtgccttatgtatatgaggtactgaaatgagtacataaatatttcagatacaggttctgctttgaagagtgcctagtaaattaagacatgtagacttgtgaaaagttgattgtaacactcaacatgtagatgatatctgctggacagatttacctggagaagagaggctggtcaggaaagtgagaaaggattagtttttccactggtcatccacaaagatttaccacagcctttttcattgagcttgtccttgaatagggagtaatggaggaatgaagaaaaacactgtaggtgttaggaaatagcttgaccaaagttaggatctgtcaggtgataggtgtctgatgtgatttgagtagtatacagggaaagggtgtggtagatgatgagggtaaagtttaaactttatccggacagcaaggcaatcaaattcattgagacagtgtaagactgagatggcagtgtatatggtgtattctctgatagatgtgattggagacaagtagattagttaaaacaagggtcagtaaattacgatcatagggtgatacacagccactgacccacagaacctatgtatgtttttgcatttcagtgatatgttgaatactacagagattttgctgctgtagccctcaaagcctaacagtctagctgtccagccctacacagaaaagattgacagatacctgagttaggtaattatatagggtatgtaagaaaaaataaatgttagaactaagtctgaaataggttggtaatactgaaagaagttagcaatgcgatttaacaggtaacacttgtcctatctgcctctcaagtttgtaaaaaggcatttgatatgtaggcaagtactggtgtgcttttattagttgcatagctttggtccagtcatctaactgctcagaggcccagatgaatataatgtagtaagtaggataaagagaagcctcaccagcttgattcttccttacggatttttgtcttgttttgattttggagacagggtttctctgtgtagctctggctatcttggaactcattctgtagaccaggctggcctcaaacttacagagatctgcctgcctctgcctcctgagtgctgggattaaaggcctgtaccaccacatgtgctgctcagctcttagggaattttgtaagtcatctagttggaaagacagatgtcctagaaaatggagttatgttaggggttgtgggtgtgttgtcacctttaatccaagcactcgggaggcagaggcaggtggacctctcttgagttcaaggccagcctagtctatgtagtaagttccaggccagacagggatacacaatgaggttccatctctgaaaaaaaacaaaaaccaaaacaaaacaaaaaaattatgaaggtgaaaaaaaattccctcctaccctaaggcctnnnnnnnnnnnnnnnnnnnnnnnnnnnnnnnnnnnnnnnnnnnnnnnnnnnnnnnnnnnnnnnnnnnnnnnnnnnnnnnnnnnnnnnnnnnnnnnnnnnnnnnnnnnnnnnnnnnnnnnnnnnnnnnnnnnnnnnnnnnnnnnnnnnnnnnnnnnnnnnnnnnnnnnnnnnnnnnnnnnnnnnnnnnnnnnnnnnnnnnnnnnnnnnnnnnnnnnnnnnnnnnnnnnnnnnnnnnnnnnnnnnnnnnnnnnnnnnnnnnnnnnnnnnnnnnnnnnnnnnnnnnnnnnnnnnnnnnnnnnnnnnnnnnnnnnnnnnnnnnnnnnnnnnnnnnnnnnnnnnnnnnnnnnnnnnnnnnnnnnnnnnnnnnnnnnnnnnnnnnnnnnnnnnnnnnnnnnnnnnnnnnnnnnnnnnnnnnnnnnnnnnnnnnnnnnnnnnnnnnnnnnnnnnnnnnnnnnnnnnnnnnnnnnnnnnnnnnnnnnnnnnnnnnnnnnnnnnnnnnnnnnnnnnnnnnnnnnnnnnnnnnnnnnnnnnnnnnnnnnnnnnnnnnnnnnnnnnnnnnnnnnnnnnnnnnnnnnnnnnnnnnnnnnnnnnnnnnnnnnnnnnnnnnnnnnnnnnnnnnnnnnnnnnnnnnnnnnnnnnnnnnnnnnnnnnnnnnnnnnnnnnnnnnnnnnnnnnnnnnnnnnnnnnnnnnnnnnnnnnnnnnnnnnnnnnnnnnnnnnnnnnnnnnnnnnnnnnnnnnnnnnnnnnnnnnnnnnnnnnnnnnnnnnnnnnnnnnnnnnnnnnnnnnnnnnnnnnnnnnnnnnnnnnnnnnnnnnnnnnnnnnnnnnnnnnnnnnnnnnnnnnnnnnnnnnnnnnnnnnnnnnnnnnnnnnnnnnnnnnnnnnnnnnnnnnnnnnnnnnnnnnnnnnnnnnnnnnnnnnnnnnnnnnnnnnnnnnnnnnnnnnnnnnnnnnnnnnnnnnnnnnnnnnnnnnnnnnnnnnnnnnnnnnnnnnnnnnnnnnnnnnnnnnnnnnnnnnnnnnnnnnnnnnnnnnnnnnnnnnnnnnnnnnnnnnnnnnnnnnnnnnnnnnnnnnnnnnnnnnnnnnnnnnnnnnnnnnnnnnnnnnnnnnnnnnnnnnnnnnnnnnnnnnnnnnnnnnnnnnnnnnnnnnnnnnnnnnnnnnnnnnnnnnnnnnnnnnnnnnnnnnnnnnnnnnnnnnnnnnnnnnnnnnnnnnnnnnnnnnnnnnnnnnnnnnnnnnnnnnnnnnnnnnnnnnnnnnnnnnnnnnnnnnactggtcatccacaaagatttaccacagcctttttcattgagcttgtccttgaatagggagtaatggaggaatgaagaaaaacactgtaggtgttaggaaatagcttgaccaaagttaggatctgtcaggtgataggtgtctgatgtgatttgagtagtatacagggaaagggtgtggtagatgatgagggtaaagtttaaactttatccggacagcaaggcaatcaaattcattgagacagtgtaagactgagatggcagtgtatatggtgtattctctgatagatgtgattggagacaagtagattagttaaaacaagggtcagtaaattacgatcatagggtgatacacagccactgacccacagaacctatgtatgtttttgcatttcagtgatatgttgaatactacagagattttgctgctgtagccctcaaagcctaacagtctagctgtccagccctacacagaaaagattgacagatacctgagttaggtaattatatagggtatgtaagaaaaaataaatgttagaactaagtctgaaataggttggtaatactgaaagaagttagcaatgcgatttaacaggtaacacttgtcctatctgcctctcaagtttgtaaaaaggcatttgatatgtaggcaagtactggtgtgcttttattagttgcatagctttggtccagtcatctaactgctcagaggcccagatgaatataatgtagtaagtaggataaagagaagcctcaccagcttgattcttccttacggatttttgtcttgttttgattttggagacagggtttctctgtgtagctctggctatcttggaactcattctgtagaccaggctggcctcaaacttacagagatctgcctgcctctgcctcctgagtgctgggattaaaggcctgtaccaccacatgtgctgctcagctcttagggaattttgtaagtcatctagttggaaagacagatgtcctagaaaatggagttatgttaggggttgtgggtgtgttgtcacctttaatccaagcactcgggaggcagaggcagggggacctctcttggggacaaggccagcctagtctatgtagtaagttccaggccagacagggatacatagtgagacccttcctcaagaagaaattgggcaaagggtttggtgactgtgtctggaggtataggggaagtaatttcaaaataccacataccctttctcttcattaattcagacgtttgttgtagccatattgaatttgtttctatccttcaactgccaaaaaccaaaggctggatttatccctagccagaaacaagcataagcacaaatgtcaatttgtattgttagcatcagttgtcagtcatctgacaggagaacctcagttgaagaattctctacatcagattggtttgtggtagattgtcttattaattgatgcaggagggatcagctcaccaaaagctctaccaccactagacaggtggtcctgggctttttaagaaagcaattacatatgagccagagggagagtcagcaagcagcattcctctatggttctggccctgactttcctcagtgatgaattgtgacctggaagtataaccaaataaatccttttctcctctgtattgcttgcatttagtcagtgttttatcatagcaacagaagaagactagctcaacctacaaaggagcagcttaagataggaagagttcattttgcttaacatttgaaggtacatcccatcatggaaaggttggactgtggaagtggctctgagcagagcagttagagaatgtaagtagtaaccatactaagcctcagggcccacatcacagtgaccctcatctatctaggctccaccttctgaagattcccaaaatccccctaaacaatgtcatcagatggggaggatcattgtgaggttttttttatattttaagaaagagggctggagagatggctcagcggttaagagcaccgactgctcttccaaaggtcctgagttcaattcccagcaaccacatggtggctcacaaccatccgttatgagatctggtgccctcttctggtgtgcagatatacatggaagcagaatgttgtatacataataattaaataaataaataaataaataaataaaatcttttagaaagaaagaaagaaatatagccaggcattggtggcacacacctttaatcccagcactggggaagcagaggcaggaggatctctctgagttcaaggccagcctgtgagttcaaggccagcctggtctacaaagcgagttccaggataggctccaaaactacacagagaaaaaggacctgtcaccaaaaaaaaaaaaaaaaaaaaaaaaaaaaaaaaaaaaaagggggggaggacgcagaggaagaggaaatatagccaggcatgatggtgcaggcctttaatctcagcacttgggaggcataggcaggtgtatctctgagttcaaggccaatgtgatctacaaagcaaaatccaggctagccagggaatgttagacagagaactcccaccaggagagggaggaggaaagagtgagggagaaatatcttctgataacttcaaaagcctttgtaagtccaaagtctcatttgagccatgagccatgctctcagctgtgagcacttgtgattattaaaaagcaaagttataagtgtagattcttccagtttgagatgtagcatggtcctcttggattacaactgctgcttctattcttgatgggcaggaaacacttccctaagtgaacttaggacaggtttgcccagagttctcaataggttgagtccttcactcaaggtacctttcttattgtcccagtgcagagcatgaggtttctgtttaacagtgctaatattttttcttttattattattttttaaagatttatttattttatgtgtgagtgttctgtttgcttgtacacctttatgccagaagagggcatcagatcgcactatagatggttgtgagtcaccatgtggttgctgggacttgaactcaggacctctggaagagcagccagtgatcttaaccactgagccatctctccagccccaagcgctaatattttcaacaattgacagctactttgttcacattaccatgttctcaacttgaaccagattcaagctccttttctcactttccagcttttttgctttactcattgctttttcttgctgtaaacctagataaatgcagcaagcaataaccataccacagcctgactgttctactgtcatgaaatttcttccaccaaattagtctgttacctttaaattcaccatattcatgtcttttaggacatagaatgcagccagtttctttaccagagtgaaacttaatggtttctagtccattcctgatggagatagctagtcttcgttgtcaatttgggatttagaatcaccatgggacatatctctgggtttgtttataaaggtgtttcagaaagacttaacagcagagaagaatgtggatggcatgatttcataggctgaggtcccagacctaagcactagtgtcaatctcaaccctgcctgctgattatggttgtagtgtgtccagttgcctcatgctcctgctgcagtgtctaccttgaaactttgaaccaaaataaattcttcaaaaccagaaaaatctatttatttatttatggaatgaagaatgggaatgggggcaggacacacatgtgcccatagtgcaagtgtggaggtgagaagcagctttgtggagttgattcctgtttccacttttatgttggttctgagcattgaattttgagttatcaggcttatgtgtcaaatgccttgcctactgaatcatttggcctgccctctattcttgcatttgtggttttctttccagtctttggagctcaatttagaatagccctccacagtgacccattaagctctgcttatagtgttcagttcttttttccatgtgggtcagatttaatgcagcaatgattccttttggtttttaaaaaagattatttttatttatgtgtacatctatgtgtgtgtatgcacatatgcatgcgggcacccgtaaaggctagacgagggtgttgcatctcctggagttgaggttataggtggctgtgaagctgcccattatgggtgatgggaactataagtctggttctccagaagatctcttaactgttgagacattgcctcaggtttttttttttttttcctgttagtttttgtattgctgtcaccaagtagctgacaaaaaagtaacttcagggagaagaggtatattttggctcatggttttagattacagtcgatcatggtggatatctttgtctcttgtaagttccagtatagacggcctcttttggaacttgggatttctcttcaaggggtcagtgtcaaaacacatcctttttcgttttaaccttttcctaaagttcccctctcctttcagtgtagaggatgagtttatgcatgcaccttcatgtgcttgaaatccaccacctttaactgtgaagactgtagccatctgtaactgttcttaatagtcaaacttcattttatagttttatcatttggtgtagacagtcattttcagtgattaactcattgagagaaaagaaatggcagaggagatagacaagaaaacaagagtgatcaaagccctgccaccagtttgggctcaaaacgacatctattttcttgctatttcagctgtattttgctgccttttcttataagagcttgggataggaatgaactcagtggaaatggtagcaaatagatagcctttggagactggccattggggaagcctggccttgggtttagagatgtgcttttgtcttaggaaggacctaagttcaaggtagctgacaaaggggctttcaaatggacctgaacctatttaagtagtaaagcctcatggtcagctgactgtgtcctgaatgtggctgcaagagctccacaagatcttgtcctacagctagcctagtgtaagataacagggagaaaaggttaattcccaggccttatcaggaggggaagaaatcacaatttgtttgataacaggatttaaatttttcagtctcaatttgaaatgataaagctatggtagctagaacgaggaaagaaatgagtctcaagctaaaaagcaaagcacccctctcaacaaaaacaaaaaagccaagctttgttaaattatataacttatcccacttaaaccctttaaccattttcttcttggcatagtatttgtaaacctggagctttttcctagagactgtgtccttttcactgaccatggctggctctgagctatagtgtctttcagttatctgctttacctttgactctgatctgtgaagcttctgatagtttcttcattcatttgggaacaagcagcctgagatcctactgtagatacgctagtgtcttactatgcctttgattccttcttcctttaagctaatctccccttcatacggatgacctgaatcccaactaaaatccacacatggtctttttaatttttgtgcaactgttctattcttctgtggtattaatttggtggagtttatcattgtctcagatcctggtctttcaccccaggccttggtttcttgggttgagtctacatctacataacattgttattgctagttcaaaactgacacgaacttaacctgcaatctcagcctccacattgagggaacaccacattgattctacatcacaaagtctagataatgtggaaagcacactggttgtggataaggaggcttattgtggccttgccatagactttgattttggacagaaggtctgacctgtcctttcaggtggtacagtctttctagtgcctgctctcattagggataggaaagctatcttctgtgtagtctcagttgcacagagcactgtctggcatgagccttggtgtgttggtttctgattgtaaagcctgagattcccctcctagctctagaggggggaggggaaccatccaactgtctcattagcatggagaaaagaaaacagtaattacttgtgcctcccttgataattctgcagggttggttcttagggaaggaggaggggaaaactggagacagcttcagctgaggaaggagaaatgttcttacttagttcccagaatatgcaaaagcaagaatttgcacatctgttgtattcttaggacattcctccaggcaggctggagactgcctggattgaatttcaatttttgtggcatatattaatgttcttactgtctgacattaagttactggctatgctaggtattctgatatttgcctttgttaaggagtagggtgggattttgctggagcactttgtgacctggctgaatttttatgctatgagatcttcttgaagcaacacaacatttggatttatttttctagtcaaggttaggtgtctttgtaaatgggaggagtcttggaaaacgacaagactgtagtgttctgtcaagtctaagaaaagcaggactcagaaggcttgaaagtgggaagttaggaacagctggaacagaattagcaaatcaatatgcaagcttggctatggacaatgactgtttgctctgtgttaatctttcattccctgtgtggacagttgtgagcccagaagtactgattgtagcagaagcggattggagaatgtgctgtgctggtgagcgttgctggggggagcttggagctagtaggttcttctgttgctgttctcctgctctggttgctactccaggccaagagaacaactcccccccccccccccccccccccccccccccctccccccccccccctcctcctctcccctcaggaagatagcttcagtacctcctttcatgtaaccttcctttagactttggaaatcatttattgtaaacaaccaaggcatctgtaaagacatgtttaaaaatttgtttacaaatgtaggaaatgattgtttctgtcaggtttatattcttctaccccttgaagtattccctttttccctccctgggccttttgcttgattagtctgcttttgctgtccaggttccaatgttcccttagcctctaggtatatattcctgctttccttatacttttgtagaatctgttccctatgtttagatggaatgctctaaatagcatggcctaagggaggagtaattctcttcagccttaacttggcagttaattgggccatagtaatgtggttcccaggaatacacatccaggacacagtaaatgctgattctcagaaaggtctccatatcattatataaggtactttgatcagatatttcaggacaggcctacttgttaataatctcaacccttagaatatagtctccagaggctgaggctggagaaatggcttagtgattgagtgactgacaatagttgctactctgaaagagtaaggcccctagcacccacatccagtggctcacaactacctaaaactgttgcttcaggggatttgatgttttctggcctccctgggtactgcacacatttgacattcattcacacaaacccacacagaaacacataaaagaaaacaaaaaatcatactcctttatgattttatttttgtgtgttaagatttatttttcttatttttatttatgcatgtttatgtttgtgtgagggaatgccctgtgtatgcaggtgtccacaggggccagaagagggctttggagctgcatttgacaagtgtttatgagatagatgtctgatgtgggtgtttggaaacaaacaggtcctctggaagagcagcaactaaaactcttaatcactgagccatctctttagtccccaaataaaaccaatctttaattgttggtggtgggagggcgtaagatgacttagagggtaaaggaacttgctgtcaagtgtgacacctgagtttaatacctgggacccacagggtgagaggagggaactgattcctctaagttgtcgaagatatggcccagtatggtaaaagcctgtgttgtggtttgaaagttaagtgtcccttgtaaattcatgtatttgaatactttgtcctgagctggtggtgctgttttggaagggagtagacacttttggatctggagcctacctagaggaagcaggttactgtgggacagcttgaggttgaatagcctagccccatttccagtctgtcctctgcttcctgacatggtgtgctgttatgcccccctctctctccatggtggactatctctcttctccttacttctttctaatattgacttactaatttagttgtgtatgtatgagtgtgtgtaggtcagacttacaaccctcttggtaattcagttctcttctgcctttttggtcctttggatgaaactcagatggtcaggctcagtgaagtgcctttatccactgaaccattttgccagtcctgtatcccttatctgtctctctacctttctttttttttttaaattaactttttttatgtgtgagaatgttttgcttgtgtgtatgtctgtgtatcatatgtgtgccaggttcctgcttaagtcagaagaaggttttggacatgagttatggatgtgtgtgtgttacagtgtgggtattaggaattgaaccttggtcctctgcaagaaaagtgtgcttaattaacctgagccatctcttcagtttcctctatcccatcttaaaaccaaagtagactcttcctcccataagtgacttttaaaaaatatttattttcattttatgtgtctttgtctgcatgtatgtatgtgtatgtgcccggtgcctgcagaggccagaataaaagggcattggatcacctgcaactggttgtaaggtgtcttgtgggtggcaggaactaaacactggtcctgtaagagcagcagcaaagtgcttttaactgctgagctttctcttaagtggctttttgtcaggtgtttgtcacagaaaagtaggtaagtggttatagcaaagtaactaatgtacctttgtgaactccttatgtaacaataggctgacagctggctggtctacagaggcttctttagtcctggcacttgggaggcagaaacaaggggatctctgtgggttcaaagccagcctggtctacaaagtgagttccatgaaagtcaggactgttacacagaaaaaccctatcttgaaaaatcaaaaacaggggctggagagatggctcagaggttatataagcactggctgctcttccagaggtcctgagttcaattcccagcaactacatggtggctcacagccatctgtaatgagatctggtgccctcttctggtctgcagggttacatgcagacagaatacctgtacatatgataaataaattaaaaaaaaaaaaaaagaaaaatcaaaaacaagcaaagaaccaaaccaaacaccaaaaaaaaaaaaagtgtcaaaaacaataggctgacagcaccacaaccaggggtgggtgtggcgcatatctatgcctaaccagggttggaaagtggaggcaggaggatcaggagttgagggccatccttggttacataatgaattgaaacccagcctgagcttcaagagatcctgtctcaaaaaataagtaagatttatgtaatgggtcattacggctattcttttaaaaagaaaagcccttggtttttcccactgtgctctcatggcatcctttgaaaggctttttgtgccattttatttaaagtagattctactcttactccttgttttatttcgtgactgtttaaattttcttcctaatactcaacatggtctgaaatgatagaaaccaggattcaaaatgtgtaagggttaagacccttgacagacctcttttctctgttacaggtgagccctgattctagagacagctgctgctgaccctgtaaccctaaggactaagtagctggctaaactcattcttggtacaggtgagtgagggtattcaggcagatttgggtaaccatgggctaagataaagggtaactagtttagggattcttttcagcttttgtactgatatcttacaattaatatttttttttctaggtactggaatattctagagatgggaataatctaccagtgagccctaggtagcctactggcctgggaggaggattgaggtcactttcttggagttgccataagcatgtttgggatcatttgtcagaaaaagggcttcctttcttcttgcttttgtcagtgccgggggcaagggcaaatataaggacctagagcctatatccccattggggatcttcttgacttcagcctatttgacctactaagccccaggttagcataaggaaatcttaagttttctctgttctgcataatgtgatcatgaatggataaggatgcagtgatccagcagagctgtgtgaaatgggtgaggatgcagtgatccagcagagctgtgcgaaatgggtgcggatgcagcgctccagcagagctgtgtgaaatgggtaaggatgcggtgatccagcagagctgtgtgaaatgagtaaggattgcagtgatccagcagagctgtgtgaaatgagtaaggattgcagtgatccagcagagctgtgtgaaatgagtaaggattgcagtgatccagcagagctgtgtgaaatgagtaaggattgcagtgatccagcagagctgtgtgaaatgagtaaggattgcagtgatccagcagagctgtgtgaaatgagtaaggattgcagtgatccagcagagctgtgtgaaatgagtaaggattgcagtgatccagcagagctgtgtgaaatgagtaaggattgcagtgatccagcagagctgtgtgaaatgggtgaggatgcagtgatccagcagagctgtgtgaaatggatgaggatgcagtgatccagcagagccgtgtgaaatgagtaaggattgcagtgatccagcagagctgtgtgaaatgagtgttaagcagcccagagaggaagggaaatcaccacattgagaatttattatgctagctttccctttatgtagacaactacattttatagacgaagacattgagacaaacaatctaggaacccataaagctgatcttagaatcagctcactgtgaataccattatgatgtgacagacttttccaggagctgcttgaagtttccctggaattatgctgtttctcttctctctctctctctctctttttttttttttaggaaatttaaggagctagccctcctcagagatttgagttatttgaggagcccagtaggacagggaggaattagggttcattgtgatcaattatatgatcaatgaggatcagagagtgcaagacaggaagatcttaagcaggaagtagcttatctaactaactggaagaagaaaatacccagaagtgaagggatctaagaagttgggctgacaggagttaggaacctggacagctgggttgacattgggaaacagagtttctctgtgtagccctggctgttctggaactcactctgtagaccaggttggcttcaaattcccagagatcagcctgcctctgagtcctgggattaaaggcctgagatacctgaatttttaatcttatctctcagtgtgcctttggacagtcttcattaccccaatttgtaaaattgttacttcctgcttccctgcagcattgtgtgtgtgtgtgtgtgtgtgtgtgtgtgtgtgtgtgtgcgcgcgcgcgcgcgcgtgcgcgtgcgcgctcgctcgctcactcacacacaggactgaacctagggcattgtatttgtttggcaagcactctactatcaacctaaatccctatctccctgccatatgtgtgtacaaccattcagtaatgatgtagagaaccaaatgagaaatctaagaaaagttttgcaaattaatatgtaacatgaatgaaagaagaaaagtcagacctgtttgttatcctactccccaaagttaagagtgagggttttccttagggtatctctgctgtaagtctttccctgcatctttctctcttctcctgcaggacctacccagagcagtgctttatcacagggaaatgggttccagagacaggtgacagaacatccaactctggcagttgtagtttgcagcatgtgctctgcagagttaggtttaaattcactcaggtgcccaggcttcaaggcctctgctggagggtagatcttaaagcagctctttttaagaacccatttcagcactaaccagctcagtgcattgtttcctgttgcctcagcagaatagcctactaccacacccactggtagtgaaagaaagggtacctatgttgaaatttcatcattccagttttcctactgtcttgcttttttcccctggccagtgatttaagctgtttttttttttttttcttctctgtctacttgaagggtcacaaagggatagaatgctcacatggtgctcttaaatttagtgttgacaagttccagtttttcttcatactctgaatcttcaggtttttattaatacctttgtgtcttggtgatctaagttccacagattctgatctttccatggcttgtgtgccaaggttagaacttactgccctatgaaaacatttcactgttacttaaaaatgtgagtggtttcttgtaaataagtgtgtaatatacagatgtatgtataatagtttatttatctagcagtctcatgttcctagagcccaactgaaaaacagggaagcaaagcattgctatccttaagccttgcataataacatattttaacatgttattataagcttagctgtcttgcttttaaacttctgcaggtaaaagtaaaagcaatgagaaaagctgtgctaatattaatgacaactagaggtaagaggcgaaagctggcagtaatgaaaagggtgaaagaaaaatgatactatatttaaaataatagactggacggcattgaaatagaggtgggtaacagccctacaaataaatacctgtgtgctttactaagataggggtggaacttagggaaataggtaagttctgaggtttttattagaaaagttatttgtgggatatactatattactaggcacagagtctatgtaaatttatttcattttcatagcaacttgagaggtatgtggtgatattcttgttttataaattgctgagacctagagaaggcatgtaggcattaattggaagagctaagcttagaatatagtagaatctgggtatagagacccaagacttttctgttatacttgggtttgggtttttagattgttgtcttttcaggcttttggatcaataatagctccccctttttgttcatcccactatataaattttctgttttgaagaaattattattcatctgcttagtgcttattggtattttctatgcagcatgcatggtttcaggttttgagatctaacagtgaataaaatagtttgatctcagccgggcagtggtggcacatgcctttgatcccagcactggggaggcagaggtagatggatctctggccaggtctgttaaacagagaaaccctgtctccaaaaacaaaaagaaaaatagtttgatctcatgtttacatattagtggaagaaagcagaagaatgaataaatacgaagaaaaataatgtaggataagggaataaggagaactatagattaaagaaggtctgtctgagaaaaataaggttggtgcagaagctgaagtattgaactttgtatcttaaactaacattctaggcacaaggattcagcaaggtcagaagtcctgaaacaagcatattggttgtgtttgaagaaaaaggtgtccttagtgtatagagaggaagtaagcaaaggggacattagactatgcagaagttgtcttaaagagtaaggtcaggttatgtaagattttgagaggaatgttgtgattaactagctatctttaaaaaaaaaaaaatgttctgcatggcggtggtggcacacactttttattaattccagtactcggtaggcggaggcaggtggatctctgtgagttcgaagccagcctggtcaacagagtgaattccaagacagccagggctatacaaagaaaccctgtctcaagaaaaggaaaaaaatcaggctggagagatggctcagaggttaagagcactgactgctcttccggaggtcctgagttcaattcccagcaactacatggtggctcgaaaccatcagttatgagatctggtgccctcttctggtgtgcagatatacatgaaaacagaatgttgtgtacataataaataaaatctttaaaaaagaaaaaagaaaagaaaaatccctctgaccgactccaacagctactacctctcactctttatgtagtgtggaattgcaaagaactgtgagagcattaccttgttccagttctcatttatttattttacaatgtagtattcagtcttaatctgtgggtggcttactataagaaaattctcttttactcttaggtttactgagaggttttattatgactggttatattctgtcaacatggtattacattgatttttcagatgctaaaccaaccttgtgttcctagaataaatcccactttgtagtaatgtataattatttttttttaatgcagtgttgattttattttttaagatttatttattatgtatgcagtgttctgtctgcatgtatgcttgcagaccagaagagggcaccagatctcattacagatggttgtgagccaccatgtggttgctgggaattgaactcaggacctctggaagagcagtcagtgctcctaacctctgagccatctctccagcccatgtataattatttttatgtgatattagattcgattgtatttttgtgatgtctttgtttggctttggtatcagaataataatagtggcctcaaaggctaaacgagaagtagaatcatggtcttttctgtagtctgaaaatttggaaagaattatattatttctttagaagtttgatagaatttaccactgaagccatgtggacatgaaattttcctaaaaatcttagttactaattcattatagaaatgttttagttttttcttacagtaatgcttagattttctatttcctttttagtcacttgataatttgtgatttctagacacttgtttataagttgatttgttcacttaaaattatttgtagtattttcttatattctttttatataaaatcagcagagcatctgtgtgcctggttttagtaatttgtaacctcatcttttctttgtattggtttatacattttataattttttttcaaaaactcaatttgtagtttcattagtttgttgttgtgaattgatgttctcactttaatctttattatttcccaacctctgtttgctttatatactttgtttctctctttctggttcttaaggcttaggccactgatttaaaattgtatttatttattattactatgtgtatgtgtaccctaacccttttcttgtttcattaaaactaaaaatgttctttcttactttcttactgaaacagtgggcagagacgaagacagctaagcaagagagaggtactaataggtcctatagatcagatcagttagaggtcacttctagaaacattggtggcagggagtcctgagcctaagaatattgccaagaaatcagagtctaagtcaggaaattggaaacttcagttcaggaaaccaaggtctgttagtagctgtggtgctaggattatgtgataaagctaggcctagtggcacaggtttataattccagctacttaggagggcgaagcaaggggttctcggcctgctctggctgttgaaatgcagtgtcagcctggacacttccatagaccttttctcaaaaaagaaagaaaaaggaaggaaggaaggacggacggatggaggcacaggtcacttcattttagcttcaaaactcagttgtgatagacagattcttgagattggtaagagatactgtagggaatttacctaatggaggttaggtggagggagtggtaaaacctattttaaaagaccccattaacacaaagcagagagcaaagagctgggcctagtggtaaagagctatagtcctagctactccagaggctgagcctggaggggaaggaatagcatacaagagtctctgtgctcctttgggggtgtgtgtggctggcatttttgttttatcttgagtttctattcttttacctttatcaccattcccttatatttctgcagttagctgagtctatcaagagctaccttagtgcctagggcaagagacaaaagactctaaagacatcactgttgggggtaagttagtgtttctttctcactcttcaaccctgaaactatatgacattaaaggagtcagatttgtactaagatttgagtctttgctgtgacgtttatctcctgtgtgactgacttcactgacctgtagttttcctcatctgcaaagttagatcttattgtggttattgtgatgctaatggaggatggaaaaataccaggcctgcctaattggagggagtctgtcactggatataccgtctttagactgtatatcctagggccccatattcactttttctctgcttcctgtctgccgtggtgtaaactctgccatattttcctttaccaagataccaaccttaaatcaaaaagcttcttcctccttgaaagataaagaagggagtaggaagagccttggtatagagtagggttcacctatcagtgactgaaataaattccccaaccatgtgttacataattagatttaaaaaagggaacctggtagttcaggttctgaacttttagtctggccaacctcaggaaaccaattcattcctgagtttcactttcctcagctataggaggaacaaaggcagaaagcccattatcttgttcttagctgtttgtattctggcttttgcccttggttgagaggatttcatctgtgagaaggcttttcttttctttgtatttatgtgtatgtggtgtatatgccaggtgggaactggagttgtgagctgcctgatgtgggtgctgggaaccaaacccaggtcctctgcaagagcagcaagcactatttagtacggaatcatctttctagccccatgagaaagcttttcaagagttgaggtttaggggctggagagatgacactggctgcttttcagaggtcttaggctctctttgtcctctgctcatattaggcacacaagaggtacgtagatactacatgcagggaaaacacctgtatacgggttttttaaaaaaggctttgtcagccggacgttggtgccacatgcctttaatcccagcaccctggaggcagaggcaggcggattgctgtgagttcgaggccagcctcgtctccagagtgagtgccaggatagggtccaaactacacagagaaaccctgtcttgaaaaacaacaaaacaaaaaaaggctttgtctagctgggtgttggtggcacacgcctttaatcccagcacttgagaggcagagacaggtcaggtggatctctgtgagttcgagactagcctggtctgcaagagctagttctaggacagcctccaaagccacagagaaacgctgttttgaaaaaccacaaacaaataaataaataaataaataaataaataaataaatagtaagtcacttgctcagaccagattccagatctcttctgtctcattccagggttttcttttctagagtcaaaccacatatatgtaaacaaagcatttcagctttcctaacatctccatcaacagccttcttaggtcccctgtggtgtgtgtcaataatacaggctgtacttgtttgatttactttggctggtacaagatccagatgctttcagaatagcacaacagattctctaaatctgcccattcccaatgtgctgcactctatcaactggctggggcttgtccctgagtcctccctacctgtcatgtcagtcacattgttttcttttggtagtttgccctttccctcttaaattttttaaaaaattatttctgtgcataggtgtatgcatgttattagaaataagtttgcaaagaaagagactaccattctagtaagagtctgagcaaggcaaaattttacttttggtctttgtcatgggaataaactattttactttagccattgtcttagaactaccactttgtgcagaaagtaagttgctagttttccgctcttaactcatgctacccccacacttaaaactagcagctcattctcctctctagtcaatgttcagaattgtttgaagcctggctccattcttaacctccacggaagcaattggaagagaattgagatttgaagttgactatttctggatttgagccctaggaatagcgtctccgttttccctagttaattaccagctaatattagataggagtctttaggtactcattgcttcgagcatgtgactctacagctaattcaacagttaatttttaaaaatttctttattagcatatactatatattatattgagttttatgacatatccatgcatgtatataatcatatatttaaccatattcacgtcctatcactattttgtttccttcctacttttgctgatctccttcctcttcttaagcagttttcctactccaaccccattgtcaaatcagagtaggattactacaggagcgtagttgagaatacaggcaacatagtgtggctacaccactggagaaacttggaaaagttggaagttggaaaacttaaaaaggaagcatacacacacacacacagaggtacacatataaatacatatataatacatataaacacatggagagaagtcctgtagaagttagaattctgcatgtatctactgtataattgttgtctagtccccctccccctctttgcaatgtaaatttgaggtcttctgcttttcttatcagagccctaaaattcagcctcatagccatttggaaacctgatttgattatgactgctcacatcaaaacatttctgatgattgaacagtagtaatccaactggcagtgtgccacttggagagagcaggatgggaaatgattatctcgatgaatggtaactgttaatccatgactagaaatgctccacaaatcaactaaagatttctaagacaggatttggggtgggtgggtttctaatcttataatttaaattaacccatttctattaatttactttctgcctcgtggctttattacctttactctgcccatgttgctttcctgcttcctccatgtctggctgatgactcctcccaactctgcccttcttcttcccagtgttctctctgccctgaaagtttttcctagctattggccatttagatttttattaaaccaattacaatgaaatatcttcacagtgtaaaggaatattccaaaacataaacagttgcacattttcccatatacttgtataaaagacagtgaattgacaagtgttcaaatgttgctgaggctgcttagaggccacctctgccattctgaacatcatttcaagtgtctaaacaagattattgtaatttgatagaacctctcttcataattacacagattcctatatgcgtgtttactaattatgttcctaggttagcactttccctcttaagaacatcagtttttatgcctaataatgatagtactgtttataactacttttgagattgtggtagtttttagatatgaaggtatggtggggggtcattccctgcctccccagtgatttgatgctttggttctctagatggcactattgaggtgcttagaccatgaaggtgatgacttcatcaatgggttaaaactacccatagattcatactaaatgggcttttagaaagtaggcctgattggacgatgtaggtcaattaagacatgattttgaaggataaatctggtccctctgtcttggcttactcgatgccatgaggtgaacagcctcgttggtctcaggcccatagcagtggagctcgttagccacggaccgaaaccatagacaaaaataaatctttgttccctttagttgactttctcaaatgatttgtcattgtgataggtaaactaacagattagtatgagagttcaaaatacttcgtaaatatcataatctacaaaacttgcttgagtaaaggctaaggcatactgatctgtttttgttagctatttgaagactccaggagatggcagtaaaatcagttcttctctaaccacccttatcctaagaaatgctgggtctcattttcttcctgccgtttcatggcccagaggacttgggtaataaaagagcccctcaggtcatgcatgagtaaccaggacagttatctagcagataccaagggcagggcaggtagctcaggaagcagtagctgatgaacaaaaggctttctctctgttcctaataaattggtccttggagatcctagctttgaaattctaattgacacaggaggaaaagattcattagactctggactcattaaaatgctctgctgctcaccttcaatttattcttggcagttggtcagaaggaattaactaaactgacagtctgtgatgctgctgacagcagagtcctgtgtgcttggtggtactgggggctgtgggtgttggttgtgcctcctatattctatggaatatatagatggtttgaaaagcacatcatccctaggacttcatgagtctaaatctcacatatctttagcactgaaaggaccttctgagatcataagggataactcatttacagatggtccagagaatgactagtgcttgctctagtcttaagatcttaagatcaccaagcaatttaatggtgaaattatggtcacatagcctgactttgggccaagaatatttttcccttggacccattttgaattttagagtcagaatgtcattaattcagttatgaaacatattattttatttatgtgtatgcacattttgccttcatggtgcttgaagagaccagaagagggcatagaattatagacggttgggagctgccatgtgtatgctggaatttgaatccagatctctgggggtagggtggggggaaaatcagtgtttttaaccacttagccatctctccagctcttaaaatataatacacattttgtgtgccaagattctgtgacagaatacgcatggggttggaggaggatagaagaagggagtcatgtacctttcccatattagaaattagaacgaccaccacatggactgaagagatgactcagttggtaaagtacttgccatgtaagcatgaggaccccaagtttagttccccaaaccagagttaaaaaaataccttgctggttgaggccagcctgatctacagagaaatttcaggacatcaagggctacatagagaaaccttgtctcaaaaaaacaaaccccccccccccatttaaaaaaaaaaaagaccttgctgggcatggtggccatgcctttaattgtgggcaggggtaggcagatctctgttaggtcaaggccatccaggtctacataacagcttcaggtcactcaaggctacatagtgagactgtctcaaaaaggctataagtaagtaaataaataaaagttgattgtggtggcatgtccttataatctcaatgctagggaagtggagatgggtaggtcctgtggttcattgaccaacttggtgagatgccctgtttgaaaaaggcaaacaagatgggcagcttttgaagaatgacatctaagattgacttctggttgccacactcacctgtgtacaaccatttgcatacatacgtttattcacacctacatggacacatttcacagaaagaatgacaaacaaaagaaaaaggaatgattactgctaatgaggaatttgttcactagagaagcatatagggaatatgaaggctataggcccagcgcaactggcttctgtatcccaggtttgagattagatatagttccttcattaagaatacagacttagactatgtcactgttcccagctagggcctagattcaagaatgctttgctatagtttttggcattcgttgctaaaagcatgggagaacagatggccatctcagcagtttggatcatgagggtatgatctgagacagagctagaagatacattgagagctctatacctagttactgctgtttaggcccctcccaagctgttctctatctcagaacaaagcaaaattagctaactctatttctcatctctagtcttccactcccacccctatcccttctcctcgtcccatatatttatgctgtactgacctcagtgtaagggctactgggagctgctatcctaaatgaccctttgaacctatttcccaggcatgtctcaagatgaagctcatgagtctggtcccacagcccttatggcatctactttatttagatcattctagctgtaggcctcctaccaggctctcttctcatccactcccctgttttcattcccaactcttaagaattagataatctgcttagtatgactgcttagcttaaagaataatcaatactgagaggaaactgatggttcttgattatttaaaatgctgttaaattttagtaagtattaaggtgcacatgacttggaatccctgaaagagtgtcataatttttttttttaaagatttatttattatgtgtacagtgttcggcaccaaatctcattacagatggttgtaagccaccatgtcgttgctgggaattgaactcagaaccaggcagtgctcttaacctctgagccatctctccagccccgagtgtcataaattttagaaaaagaaaagataacaatatttatttatgtcatttcagaaatttcttaatattctgacttttgtacctgtttttgtctttgagctatagagaaactctgagggaaataatgcaaggatttctgtttctgcttggcatttatggaagcctagggaaggctagtgaccatttaataatcttaatggcagagcccaaatagaaataagatgtggaagataaatggttatagacttgaaacaaggcattcatcactttctagtcatgtgactctgaagaagttattaaacttctctgagcctgtttctttctgtgtcatatgaggaaaacatgcacttaatatagttgctttatgttagcaccctacagaagaaatataagaactcattattgttcctatctcagtggtttttttcccagagatttattcaacttgcttttaattttgtatgtacacttgtgcagcaacatgtgcatgtgtgtgtgtgtgtgtgtgggggggtggctcaaggctgtaagtctaacatgtactgctgagacatctccaaccccttatggtttggttttttgtttgtttttattttgtttgtgagacagggtctcactcaaggttggccttgatcttccttctggcctctatttcagtgctttaaatatgtattatttattgattttttttgaaaatagattctttttctcatatgatatattctgattataattttccctccctctgctcttcccagttcctgcccatcttccctcccctccagatccactccctttctgtttctcattagaaaagaacaggcttctaagaggtaacaaccaaatgtgacaaaatgatgtaaaagctatcttattgaagtcagacatggcaacccgaaaggaggaaaagagtcccaagagcaggaacaggagtcagagacccacttgttctcaacagttaggcgttccttaaaaatactaggctaatatctataatatatatgtaggggacctagtgtagacccatgtaggctctatgcttgctgcttcactctctgtgagtttatgtgcaccttgcttagttgatttagtagagggccttgttctcctggtatcacccatcccctctggctcttaaaatctttccatccctcttctgcaggattccctgagtgctgacgggagggatttgatggacctccaatttaggaccttgacaacccccaccccacccctgctgaaggtctctgcatttggttcccttctgctgccagggaaagtctctctgatgatgactggacaaggcaccgatctttgagtatagcagaatattattaggaatcattttactaatgttttttgttttagagagccatcgtgtttgattttacccctaggtctctgggctatctagtctctagttcttggttagccaagcagtgtcaggtgtgagttcctttagacattggttggctacttccgcaagttctgtgccaccattgccctagtatattttgcaggtaggacagattgtaggtcaaaggttttgtggctgggctggtatccatgtttcctttcagtagcctgcagagtaccttcctacaccagagaatagaacgtggtggtgaagcttcgtgtaggcaccagctcaacctaccgatgtcagtgagttgtgtgggtggtgttcttggcagctgacagtttgctaagaacaaccatttgtcttaacaacagtttgagttgtttgagggtttccttgggactcctttaaccaccaactcaagtgaatttcaacccagtccagccaccgaagtcttgcctgacaagaaatggccagttgagtcctcatcaggatcaccttcagagactccaggacgtttccactgcagtaggtttccacacgaccctccaaatgcaccccatttcatctcttccctgcacttcctccctctaccccatctctccccctttccctgatctccatcccagtccacctataaaatttattctattttcccctcccaggagatccatgtgttccctcagacctcttctctctgcccaaccactgggtctatggattgtagattggttatcatttccttaatggcttctttatcaaaaatcaggtgtccatgtgtgtggatttatgtttaggtcttcagttcaattccattgatcaacttgtctatttagctttgtaatacaacttgaaatcaggaatggctgaatgtccagcagttctttgattgtttattattgttttaaatatcctgggttttttgtttttccatatgaagttgagaattgtcctttcaaggtccagaaagaattgtgttggaattttgatggggattgctttgaatctgtagattgctttaggtaggatggccatatttactatgttaatcctactgatctttgagtatgggagatctttccaacctctgatatcttcagtttctttcttcaaaaacttaaaatttttattttacaaatctttcatatggttggttagagttaccccaagatattacatacgattttaggctattgtgaaaggtgttatttccctgatttctttctcagtcaagtccttttgtcatttgtataggtaattgatttttttctgaattaatcttgtatgcagtcacttgaaaagtgtttatcagctgtaggagtgtcacctacactttcaggtagaactttcaggattgcttatgtatacaatcatatcatctgcaaatagtgaaactttgacttcttcctttccaatttgtatcccctaactctccttcagttgtcttactgctctagctagaactttgagaactatattgaatagataaggagagagtccttatgagggaaattggtttgtaaatttcttgtcctgtccctgattttagtggaattgctttgagtttctctgtatttaattcgatgttggctataggcttgctgtaaattgcctttattatatttaggtatgtcctttatatccgtaatttcctcagaatgtttatcatgaagaggtattggatttttgtcaaaggcgttttctgtatctaatgagatgatcatgtgattttactctttaagtttgtttatatggtggattacatttactgatttttcatattgaaaaatgaaaaattgaaccatccctgcatctctgggattatggtgaacaatctttttgatgtgttcttggattcgatttgcaagtattttattgagtatttttgcatctatgttcatgagggaaattggtttgtaaatttctttgttgagtctttatgtggtttgggtatcagggtaattgtggcctcttagagtgaattgcgcagctgggcaagggtgcatgcctttgctcccagcactcaggaggcagaggtaggctgatctctgtgagttcaaggccagcctggtctacaaagtcagttctaggatagtcaggaccgttaagcagacaacctgtcttgagaaaaacaaaacaaaataaacaacaaacaaaaattatgcagtgttccctctgtttctattttgtgtaataatttgaggagtgttgacattagttcttctttcagagtcttgtaaagttctgccctagaacatctggtcctggggtgaatttgttcttttgtttgtttgtttgagataggtttttccagacttgcctgtcctggaatctcattctgtagaccagactagccttgaactcaagagatcctcctgcctctgcctcctaaatgctggggtcagaggtatgtgccaacaacatcttgaggttgggagacttaatggctgcttctaggggttatagctctatttaaattgtttatctgatcttgagttatctttgtaagtgatgcctatcaagaaaattacccatttcttttagattatctgatatggtggtataggtttttaaagtatgtccttaatgattttctgggtttccttggtatctgttgttatgtctccctctttaacttttgattttgttaatttgaatattctctccctgacttttagtttgaacaaggatttgtctattttgttgatttttctcaaaaaaagacaccatatttcatttatatgtttttttttttttgtagtttcgtttctattttattgatttcatctcagtttgattatttcttgaggtctactccttttgggtggcttacttttttgttcaggtatgctctaagttcctggtatgagatatccttttttttttttttcttttccagacagggtttctctgtgtagctttggagcctgtcctggcactcactctgtagaccaggctggcctcaaactcacagagatacgcctgcctctgcctcccgagtgctgggattaaaggtgtgcgccaccaacgcccggctgaggtatccaatttttttacgagggcatttacagtaaactttcctactttcactgtgtcccataaatttggatatgctatatattcattttcatttctttatttttgtcttgatccacttttcatttagtagaattgttctgtttccatgagtttgcaagctttctgttgtttctgttgatacctagctttaatctgtggtggcctgataggaagcaggaagttatttaaattttcttgtatctgttgagacttctttgtgtccaaatatgtggacagttttggggagagttccatgaggtgcagagaagaaagtatatccttttgtgtttgggtgaaatgttctgtaaatatctgttaggtccattatttctctgtttggcttttgtccggatggcctttctgttggtggggtgaaggattgaagtctcgcactggcagtgcatgaggctcaatatgtggtttaaggtttagtagtatttcttgtacaaacttgggtgctctttgtgtttgggcatagatgttaagaattgaaatatcatcttggtggatttttcttttgagtatatggtgtccccccctctctttttaaaagattttatttatttatttcttatgtatacaatattctgcttccatgtatatctgcacaccagaagagggcaccagatctcataacagatggttgtgagccaccatgtggttgctgggaattgaactcaggacctctggaagagcagtcagtgctcctaacctctgagccatctctccagcccctccccatctcttttgattagttttgtttgaagtctgttttgttagatattaaaatggcaataccagcttgcttgttaggttcatttgcttgaaatatctttttccaaccctttacccttaggtgatagacccttgatgttgaagtgtgtttcttggatgcagcagaagaatggatccagtttttcatatccattgtgtcagtctgtgtcttttggttggggaattgagaccattggtattgtaatgtatcaatgatcaatgattgttgagtcctgttattttggtggtggtggtggtggtggtggtggtatgttgtgtgcttcccttttgatatcactggtgagattatttcctatgttttcatgggagtagttaacctccttaggttggagttctccttctagatactgtttaaatttgacttttccatggaatatattgttttctccatctgtagtgattcaaggttattctggataacagtagtctgagctggcatctgtggtctcttagaatctgtaggacatctgtccaggcccttctggtttttcttgtaggttttaatactctttctttgttctgtacgtttggtgttttgattactatgtactgaagggtctttctttcccagtccaatctatttggtgttctgcttgcttcttgtacccgtataggcatctccttcttaggttgggcctttgagttgaatttcttctccttcctctatacctattattttggtttggtcttttcatagtgtcccagacttcattgatgttttgtgttgggggtttttagagttgatactatctttgactaacatatctatttcctctatcatatcttcaacacatgagattctctcttccatctcttgtattctgttggtgaagcttgcctctgtagttcttgttcatattcctacttttcatttctagaattccctcagttttttttgtttttgtttttgttttgttttgtttttatcaattccattcccaattttgggtcttggacaattttatttatttccttatactgtattttcttgtgtttctttaagggatttattaatgtcccctttaaggagctctgtcatatttataaaggctgttttaaggtcttttttttttctgcttcagccatgttggaatattcaggacctgctgtggtaggatagctgggctctagcagagactttatttccctggatgttattgtgttttatttatttattttttattttatgtgcattggtgttttgccagcatgtctgtatgagggtgttggatcctctggaactggagttacacacagttgtgagctgggaattgaatctgggtcctctggaagagcagccggtgctcataaccactgagccatccctccagcccctattgattgtgtttttatgttggtgtctcagtatctggggttggaatgattataggtctggggatcatttctggatttgtctttgttgggtggttgtattgttccttggtttctgcttctttggatttttagagagtatgatggcagtttgttgcctgttttcctggcatgctcagctggtgtattcacagggaatgcctgctggtgttggaggatgggatactgggatgagatgggggaaggaaggttggaagagagtttctgtgatcctttgggaacatgctcagctaggaaagggagaccacagcaggtttcctgctaaagagctggggatgagactgggggaattggatattaggatccataggagagatgtgcccttcagcttactagttgccctgtgagaagtggcctttggttagccaggggtgcctgctggagttgggttcctggacaaagcaacacatggaggggagtgagggtaggagggcagtctatggggtcacaggagatacaggtggtagagaaggaacaccagggatgagactgggggagtggctctgcggaacagagaaggtctgtgggcagactacctggttttcaggtatgacctatggtttaccagggagtgtctgctggagtgggggctgtgatacagcaacaaattgggggagaaaggtttggagtggttgaagaagctgaccagaagtggatgagatggaatgtcaatgcctttttgatattaggcccttttctgaggaatggtcacttgtgtgttaaagggcattactttccattgaagaattaccgtagaactgatcttgtcttgctcctttgttttcagggtcagttgggtaaggtttgcaattgagcttttagacccactatttatataaagatgggggaagggggcaactcctggaccgcagcattatttgtactgcattatccttctttttctaaccagcagatgttgaaattatagacatttctgtagtcactaatcaaagcacattgtttgagcatcaagctttctgttttgacttgtttgttccagcaggaaaataagtaaacagcagatttaatggccaccaaatgtttccaaacagttgaagaactagagtgtcctggtcaagtaattagctttgtgtctgcaaagttgcatctaactcacaggctgttttctctcatcattgtcttgcctcttcttctgccctactaagctgcagagtgaaggacttgggcacattcggttcttcctgtaagtttagattgcatcccagggatctcggggttccaccatgcagttcccaatgcagaccactctggtatcaataattataacaccactaatttgaagagaatctaccagttttctgctcctttgttgtcatctctatcatgaagtttatagggtatgtgttttgggggtcccatctgccccagcccccaggatttcactgtgtagctctgactatcctagagctctgtgtatagacaaattggcccaaactcacagagatctacctgcatctgcccatcaaatgcagggattaaaagtatacaccactatgcccatctgttcttttggatttttatccagcccccgggagaagttgctttggcagttggtggggactgtctttatagttttctaagtctcctaggttggatttagttagcaggtcagtggtggcatacacctttaatcccagaatttgtttgagaccaacctggtctacaaagtgactttcaggacacccaaggctacacagagaaaccaaaaaaccaaaacaaaatctcccttatattgtctctccaaagaagagactcttgaaagcctttttttccctttaattttaaatttattttaattggtttccttgcacatatgtatgtgtgaggttgtagggttttctagaactggagttacagagaattgtgagctgctgtatggatgctgggaattaaacttggaccctttgaaagggaagtcaatactctcaaccactgagccaggtctctagctccaaacctatcttatgttcaaaaaagcccagtgacattgaagttattatttcccttgtcataggccattgaggtgggaaaaggggtgatcatttataggtaggtttactgttatcacacagttgcttagtatgagcttgatgtgtggttaatgtccaagaagtggttagtagttggaaaaccattacagtctgaggaatgaagttcatgccttttaaaaacaatgctttgtatttgtttctccatggtgggacactgtatagtatattgaagatcactgggtaatacagagaggagggctgggtgtccttctctttgttggttgctgatagataggtgttttctggctcttgctattctgcttggtgaagaccttgtgcatctttctaccacagaaaagctcgtatccagaagtctggtctgaatattcaacctctcttttttctttgctcaaaataatgtaatgaactcagcttatccttttgctccaactttgttttctctcttcactgtcttgtctccctctttcctactgaagggtaaaggacttgagtatatcttaataactacagctatatatttaacattaaagaatttctctgtcaggaactgtgaggaatcatttattgtaacaggacttgggtaggattctaaaatgaaaagacagggtctcactttgtagccctggctggcttgaaactcactatgtagaacagactcttgagctaccagatatatgaatgctgggattaaagacatgtaccaccatgcccagctttggtaagattcttacacttatttgttgccataaatttcagaaaacacttgctggtttcatggtagtagcgttggaggccaggattgcagtgatgaatgcttttagagtttagaatttagtatagggaagcagatgtgtaaatacagaagtgcagcagcagataatgcagctggagttcgggaaggaatttcagaatctcaagaatctgcatgagaggaaacaaaggtttttccttgaagagtttcatcaggactatcagtcacattaagggatttgtacttggaaaattcctttgtcctcagcagctttcgtcaccacatctgagatcggctgcagtcctgttttatagatgcgcaggctctcttaaccccagtcagtactaatactgtgatattggagccatctagtaaatgggagcaacagtaatttttactaaaaacagttgtttttatttagaaaattcccccaatgcttaactttcttctttttttaattaatttattttctcatttactttatgtatatggatgttttgtctgcatgtatgtctgcacagtacatatatgcatggtgctccgagaatctggaaggtgtcagatctcttcagaccgactggagttacagacagttgtgagctgccatgtggttgctggggattgaacccaggtgctctggaagagcagacagtgctcttaacctctgagccatctctccagccccccaatgcttgactttctaatattttactaaattctcccagtgacatgtatgaggaagatcctataatatttccatttttcagataagaaaactggactgacaagatggcttagcagttaagtcacttgtcaagcttgatctgagttctgtcctcaacgcatggtagaaggagagaaccaacttctgcaagttgtcctttgacttatggtgtacatatgtgcttctttcccactcttaataaattaatatgtaataaaaataagaaagttaaggcacagagagattaaatcacttacttagcatcctaacacttgatacctgaggaagctcatcttgtacccaggtcattgccttaaaacggccccaaggtgtgagcatggtgtagcaagctacacctgcagtttgaactgcttagaaggctcaggttgtaggatcatttccactcacaagttcaaactagataacacaggcctgcctcaaaaaggaaaaatagatgcctctacctccacaaaggacattgagactgttagtataattctttctttcaagagttataaagtcagggctggagagatggcttcatggaaaaaaaatattgtaaagctgagaagttaaatatttaacaaagttaaagtggtgtttaccactctagtgggcagcatgaacctggaagagcagggactaaaaatgaagtggcctaaagtctcatgcagtagccaactttgtttggaacatcaggcagtttatactctgagagttaagaagagtcacccaaggaaggtatataattactaggataaaccacgggttgcaaaaatattttcccttagagatatataaacaaataacaatagatatctgtaatgaataatctaaagtcaagtcactcctatatgctatactgggaggggcatgaaagcacattccaagaacaagtccatgtttttgaagaaacggaggtcacaagattcatgactttttttctttttctttgaaattttcttacaagtattcagaatcccccccacacacacacccaccattcttgtactgtgttctgacacatgataagcagtaattatttatattacaagaagtgattcctaaaggctgatatggcttgcttgaacttttgcacagatgtctccacattttctctctcctgcatctttgtttcttaaaaggcaggcatagggaaaggagagacgtagaggtgattgtgcatggtttttagctcagttcagttcaggagatagtccttgagcacctactgtgggtctctcctgacaggcagtgaggatgctgagataaaatagatggtgtttgctgttgtattaggatgaagacaggctaggaagaggtgacactgagacatcattttgataatggtctcctcagatggacttcagccagcacattagacctacagtccatgcctcataccacagccagcaaggcattcatattaattgttaaaataatcacccatatccttgtcctccttaaggtactgttattaatgtagaaagcagtaataccttaaggtattatttaagtcttctcaacacttgaattggtaaattctattttgatgttagaatgctggtaaggctgaggagagagagtccttgtgctgagaactgtgctttaggaaaggatttatgtctccctaggcttcctgtctggttatctgatgggcttcttagttatcacatactttatagtatcttgtacccaagcaatttttctccctaatttggcagaatgaacaagaaatgggaagatttctgaggtcagacaatgaactgagtggtttctaagattagaggctatgccaaggcaatgagggcttattgagtattattgtatgaggaacttgcaaatagtcagtctgtgtctgtgagcattagcacccctgctgtgtctggcaatgtgctaagtgagtggaaaatagtagaaaagttctgtgctgtttggtgagagaagacttaacttgagagaaagagaagtcagcatgagaacaggatactctgcccagggattttaattggtgggttagactctgaagagcacttaaggtgtgcctccttacagaacattgtggcttgtcacacaggaataaatactggctctcatgcaacaaagtcttcctgatatactgtcatccagttctctggtgtcattttctgcagcatgaatccttatgtatcccagattatgtacttattattttcaagctacaaggcaagttaagccttaaacatttgactgtttccacttcccctagatgtggactgacttcattttgtccctcttaacaagattagaatttcttgatgattcctttaaggagtgcacataggcattagatactatagtcctggagaactattgggttgtgagctgtctgaggtgggtgctgggaatcaaacctgcattctttgcaaaagagtataaacattcttaacccctgacttatgtcttgccccaacaaatgctttcttgataaatcagtaaataaatctttttgttgttcctttgtctgagaaactataattatttccttgtagcattcaaaactctgtgaagaaaaaaagccggtaaacaaaatcagaagactattcattttcacctgggcagaacaacagatgagaatttgttttcccctaattcacacagttatacataagcacaatataatatatgatcctgtttgccatgaaagtggcagtcattcaagatagcactgtaaattgttacagccatttgggaaagcaattaggctgcatatctcaaactgtaaaaatgttcatacatatgaccagtaattctgcttctggcaatctatcccaagaaaatatatagtatctagaataaactttccctcagatgatattatttatatatttataataataatatgagaagttagaaaaagctgcaaagaataccagtctagactattaaaaaattcatttagttattaaagcagtagttctacagactgatacttattgaaaactatgaacaaataaagatgctattatatatactgtctaattatgttaatttggaaaaaggttatactgggcatagtttgtttatgcatgtagtctagcattcatgagagcaaggcaagaagattgagtttagtgccatcttgggtgacagtgcaagaccatgtctcaaaatagaacaaattaaacaaatgatctaactctgtaatacacaagaagaaaaacactggaaagaaataatagcacattaatatactataagaaaagtgggggtttatatggttttgggggtgcaggttgtatggtaatttaaaataatagtcattaaatgaagcaaattctcactcaaatggccatataggcatttaaaaataataaagtacatttttaaaatcttgatttctatcttaaacaagaaacaatgtggtaatacttttagtggcaatagaggattaattttaataattaataatagaggtggtaatggcggtggcgcatgccttgggaggcagaggcaggcagatctctgactttgagaccagtctagttgacctacagagcatgttctaggacagccaagactacacaaagaaaccctgtcttgagattccccccacccgactcccccaaaaaaagcaaacaaaaaatggaaggcaaattacaaaagaactattacttaggcaggtggtagtgttcacacctttaatcacagcactcaggagccagaggcaggtggatctctgtaagttcgaggcctaaagacaaccatagcagagtcctaaattacatttgagtcatcacccatatatccgcctgaatgtgggaaataaaaaaagccatagccagtgagtgcatttgttgtctttagaatcaagccttttgtgagggatggtggtcagaattttcaaggagaaggattgttgtaatgaggaaaatatagattctacttgaaaggattttgatcagcccgtatacttgagaggcaacacacttggtttgcaatgccaatttgtactatcctgttcttccgactgattatctgcctgtgaagattttccacccttagggggtcttctttcgtgcagctacatagcaaactcaggtaacacagcatgaaatctccctctatcttcacaacacctatattgcacagggacaggacagaaattttatttctcctttacaggggggaaccttgagatttttgttgttttgagacaaggtcacacagtgtagctgggtctggtaatctgcctggcttagtcttgagagggtaggatagggatgggggcacattgggattagaggtctgcactaccccacctgctggggaaccttgtgctttgaagaagtaaaatacctttccaaggtctctcagctagtagagttgggattaactttcagcccgataagggatgggctaaacaccctctctgttattctttattttctctagtatagatccaaaaagggtaatatgtgcacaaccgtggcacagctctatgcagtgattggagtagccacagactatagagattccagcagatgcagtatactgaatgaacagggatgacttaacagtttcagccctcaaggcttacttgtccatatagagattaatctgtgtgtctggttctcacggcataaggaagctttttgggggaccttgccttaagggttctttttctgttctcctcaccttggattctttgtatgttcaatagactgcttttttattccagatacccattcattatttatttattgagcacttgatggacacccagtcctgtgaccttcagaatcatccctgtggagttaaaagacaagtctttactagaatttggtgacccatttgaagagtcttgattgtatccagtgattgtactgttctcttcatcatagtttgactctaggttattgtcaaagtagagctgaccacctgtctcattataacctcaaggaaaaattttttaagttctagcagtaataatcatggtaggaggagctaatatatgcatgctttgtttgcatttgagtgccaggattagaggcctgttctacccaacctaaccttatttgcgtgctttggaatgttttagaagtgtacatgaatttagttgttttatcttccaataaccctattgatatgaatagctgccctgttttaagatgagatatcttcacaaatgatgtattttggaggctagaaagatagctcagtggtttagaacacttgttgctcttggacaggaccagggttgagttcccagtacccccattgtggctcacaactatatgtaactctagttccaggggactcaataccatcttctgacttctgaaggcatcaggaggtacatggtacacatacatacatacatacatacatacatacatacatacacacacacacacacacacacacacacacacacacacacacaccccactaatacatataaaacaaatctaaataaaaaatttaaaaagatagagttagcatatttcatgaaggttacatcacacaactagttcagtaatgggatgaaaggatgtggtttcaaagattatttattctcatgactacagttcatggttccttacaagggaaagatattcaagtgctgacttttgcttgatggcaagctgtatgggttttttgtgttgtttgtttgaaataggatctctccacttagcctggctgtcttggaactcaatatgtagatcagactcacctcaaactcacagaggtctgcttgcctctgcttcctgctttgcttgacttaaaggtatacaccactgtggccaacttattttgttttttaaagtgtatttttttttaaagatttattttatgtgttttgcctgccctttgaggccagaagaagacattgggtctcttggaactggagttaacagttgttagctgccttgtgggtactggaaattgaacccaggtcctctggtagaggaaccaatactcttaactgctgagtcagtgcaactcaggccatgcatttaatgccaactcacagcaagttgtttctttctctgtaatgcgtattgttagttctgcttgtactaaaaataacactaggtattctcttttcggggtaggggcaaggtatagttgtgagtaccaggacagccagggttacataaagggatcctatctttaaaaaggggggtggggtggttaaaatagaaagaagtttgtacactgaaaatttagctgtgcataaataaggtacaaaaacgtcaggcgttggtggcacacgcttttaatcccagcactgggaaggcaggcggatctctgtgagttcgaggccagcagagcaagttctcaaaagcaatacagagaaaccctgtctcaaaaaacaaacaaacaaacaaataaataaataaataaataaataaagtacaaggtatacaagtagctcttgtatgcattctcagctagccacagtcttaggtatgtagtcttttgggggaatgaatttgttatttctgttactcttaacttcctagatgaaaagagaggctgatgtataaacagctacaatacaagactgaacataataagaggggttagagatgtttcagtggttaaaatacttactgtgcaagcacaggcatcttgtgtttggatcactgatgtccaccatgccagatgcagcattccatgtttgttaccttggttcttgggcaggggcctgacataggcagatcctgaaatcattatagcagacctgggtttagtctcaaaaaaactaaggtagccagcaatagagaaagctacctgaagttgacctccaccctccacacataaacacatgcacaagcactcatgcacacacatgtacactcacacaaatagtaacaaatgtaggacatggcttttcttttcattttgtttgtttgtttgttttgttttgtttttttgagacagggtttctctgtggctttagaggctgtcctggaactagctcttgtagaccaggctggtctcgaactcaaagagatctgcctgcctctgcctcccgagtgctgggattacaggtgtgcgccaccactgcctggcctctcttctttcttttttcttttttggttgaatttctttattttttgtctttttttattttttattttaattagattattattttacatgtcaaccccaggtccctctccctcccctcctcccctgctcccccaattaataccctacctatcctataacctttccactccccagggagggtgaggccttatgtagggggtcttcagagtctatcatatcctttgggatagggcctaggcccacccccttatgtctaggctcagggggtattcctccatgtgggatgggctcccaaagtccattcctatgctagggataagtactgatccactacaaggggccataggtttctgaggtcttctcactggcactcacattcaggggatctggatcagtcccatgctggtttcccaactggggaggtcagctgtttctgtgggtttcaccagcctggtatggaccccttgctcatcagtcctccttctctgcaactggatttcagttcagttcaaggtttagctgtgggtgtctgcttctacttccaccagctgctggatgaaggctataggatggcatataaattagtcatcagtcttattatcaggggagggcatttaaagtagcctctcctctgttgcttagcttgtaagttggtatcatctttgtagctctccgacatttccctagtgccagatttctctttaaatctataatgtgtccctctattatagtatctcttaccttgctttcttctgtttttcccccaactcaacctccctgccccgtcatgtcctcctcacccctcctcttctccccttctcattctcctagatccctctcccccctacccccatgctcccaatttgctcagatcttgtctctttgcccttctccaggggaccatgtgtgtctctcagggtctggatatggcttttcaatcctgcttggtttcctttttcttttggtgtatagaaagacaaaccaggaatatcattcttctggaatatgtcctcttcttaggcctctggcaccagaagtttgttctagttcttgttaaacctaaatcatcttcccttgtacatgatctacagagtagataaccaagataaattacccctagaagaacatatccttggcctgcctattctctttgctcttaaaaggatggtggtggcaatttttagaaagtagtcttgacatcaaagtctaaaaaattcaagctaaatgacttaatgacttgaaagaaatgaaattaattgttttgttttctagtgtttgatagggcagggcctggaacctatctgttattgctagttcactctaagtatgaaaaattgagagtaaatatttagaaaccttggttgcttggcattttcttctatcaggacttaggtgtgataaattagaattttgcactcgggaggcagaggcaggcggatctctgtgagattgaggacagcctccaaagagaaaccctgtctccaaaaaccagaaaaaaatataatagattagaattttaaaaaacaaaaaactaatccttcatgaatagttttgagaaatactggcttacttggttattattagtatgataaaatagaaaagaacttcagtcttctggtctattaaacaatcaatacctacctcaaagaattgctttattgatgatttgatggtagatatttgggttacttaatatacttgttcacatcacttaatcctcaccaccacactaaagcacattttttctgagactgggtacgttatagggctgtaagtgaatttggatctgcatggagctatgctgttttctgcatagagtgtgcaaaagaactcttccttgtcccgtagtgtaggggatgctgtagccacgcctgcttaggggctggcttttctaccatggtagctgggtacactaatggcgtacgagaagcaaccttagaagaatagtcatgatagctgggtggagtaggtgcctcagattggagtgattctgcctctgaggcatcccaatgatctttaagcctagtaatggcatccttatgaaaagtttcaatctccttaatcataaaagattccaagcatgttagtgaatctgtaaattgctctaactgctcctctacacatttttctaggtctttaatacggtagtccttaggcaacatctggatagtatggaaactgccttctaggtatttgagtctagattcgaggtcatgatttgctgattttgagtcctcagcaatcgaccatatggacctatctaatctgtcagtcctgtactgtagtaaattatcttctaaacattcaaatatagactcaaatttgtgatctgctaccttagatgcttcaataattgatggaatggcattgtccagttcttcaaccctatcctgggtattttgcacctttgcatctagtttttgggtaacagtgtctatctgagtttctagctggctacagatattctttagttcacatggtcctctgacaccctagcctctaacgcctcagacatggaggatctctctgtgtttatcttatcattaatatgctgcatctcatcttgggtaacagacaactctgtctttagcgtattggacacagagccaagcttatcatccaatttctgttccacttgctgcacaattgtgatctgacctaatctgttctccaaaacctcattgcgtaaagctgttatttcttgcaagcaggtggtgaggttatctttgtccctgttcctgagccctctggctagtaatattacttgtatcagcaagctaactgccattacggcataagtctggtaattggcagattagcatcctcctcaaacactgaattcacgtaataagcaaaaatattatcaattttagcaaatgataaatattctgccataattttacctgatttctactccagatgcagtaactatctttgaccagcaggtggtgcaggcattcagctactcagcaccgcttttggcagtggtcggtcaggcaagatggtcacaaaggtggaaagaggtcacaaaagtggctatgcttatcttagagagtatatggcgttggagccgcaacctctgaaagagatgtggctttaaagcagcagcaaggggaagagagggtggggggctgctgaaagccaaggcctacttccgaggcctctcggctaagggcaggaagcctccgggcatgggtaggctgcagtccgagctgttctggtggctgcagctagaaacttcgacagtaaccatggggaggtctgtggaaatttcctagctgggctgtcggttctcagcagcttatcagcagccagaaagcgcttgtgtggtgcggcgggtaggctgggagcacctgtggaaggagggatctttccctgcctaggccgcagtccaggtgggacctgcaggctgtcccaaatggaggctagatttacaatatcccacttctgacaccagataatgtgggaaattaccaatatggagccaggtagaaatacaagggattttaatagggaaaaggccttacttacagagtgacctagccagctggtgggcagcaatctgtacagcaagctaaaagtgaaaccgaaagcaggctaccacgaaagtgtccctcactctacatcaccctcaccatgccctcacaggcgtggtcaggcacacctttagctaggccctaagcaggtgtggctacagcatcccctataattgcttaggggctggctacagcatcccctacacagtagagttccaattctgtcactaacctaacttagtttttgaccttaagcaagtcactttgtctggttcttaattttctcatttacttgccatgattgagtgaccatattttatcatcttacattccttagtatctagcatgatcagggcttagcgtgttaatgggtattgaatactgtggccactgattgtaatagaggttttcagtttgttttatctgaacatcctaggtattttatcttatgcctttcctctagaggatcatgtttcatattatttacgtgtgtgtgtgtgtgtgtgtgtgtgtgtgtgtgtgtgtgagagagagagagagagagagagagagagagagagagaggagagttctacctgcatgtatcgtgcaggccagaggagggcaccagatttcattatggatggttgtgagccactgtggttgctgggaattgaactctcaggacttctggaaaagtagccagtgctcttaaccactgagccacccatctctccagcccccatgaatgaatgaatacatacatacatacatacatacatacatacatacatacatacatacatacatacatacgaataatgttacttcctcatgtctattttaggcaatctctaacctgaatactttgagataaccaatatggcactatgggatgtgtctaaagtaaacaaccagggttattataaggtaaaggtagaaggggccggctcaaaagtcagaaaaagtactcttgtctattgttactctatggggcttgggcctggggcagccctgccaggcctgagtaatggctgcagcctggagcaaggttttctgtgcactgtattggggtctccagtaattggaacatggcactttccaacttataatggatagcagaacaagaggggcatttgtcactgcctgacttccctacaggaaaaaagctcataagtcacagctgacaaaccctttgatgatttttaaacttcatttacagcaaagaatagctataatcaagcaacagcaagcagtgactaatcttgctacattatcactgtgaggagccagcctcgtgaggtatgagaagtgggaggggtctgttttgcagtttcatagtaattgtggattggctcttgggcttgtgagtgtgctctaggaaagaccacatgaatttgcctgaaggatcagaagctgaccaaccgtagactcagcattgaagccattgaactaactcttgtctggtctcactcagatttgtgccacctctggcttcagtgggacaccatcatctgcttcagtaagaggcttaaaagataaaatagttgaggtagatagtaaggactctttatgattgcccatgtatacagacctggaagggtcttttgttgtctaaaatctaatgttttgtgttccagaggatgacctatggcagccatattttgggttttgaacaaatgagctaagtatatagcacccaaaataaaagaataaatatcggccgggcaggagtggtgcaccaacctggtctacaaagagagttctaggacaggctccaaagctgtagagataccctgtcttcaaaaaccaaacaaacaaaccaaaaaaaaaaaaaaaaaaaaaaaaaaaaaaaaaatatcaaatgatagatagatacacagatagatgatagataggcaagcaaagcatcatatcaagttcttaaaacatccagcagaaattcactgggggaagcctctttaagtcagtcaaatcagctagagttcccaatagtgagtccctagtagtgtcccccttgagtgagggtcccaagtaaaagaacaaatagcatagtacccaatttgatattttctccatggctggactttgagcttttctttaccactgtaggtagttttatattgtgggaaaaatgatagcatttttaccttttagctattctcaaatcaaatagctttactttggggttattttgttgtactttttctccttgtcagagatttgacaagacaaatttgaaagacaccacccagttaagaggaccaatttatctttagataaggggccttggaggatacttttgagacaaacatgcttgggtctgaaaacagcaagggaaccctgattcgaggactagtttctcagtgagttcaagtagcacaaggcagtttaccagtataatgtatattgtatagattatatggacattactggtaaaggcaggatcattcttatggatggagaaatcactgagagtgatctcatggagaaggaagaacataaatgatcaaagttgcattagtcttctcactctaatcagactaattactgtggctctctgagactcggttgcttgttagttttttaaatttcctcctttgtggtacagaggagagaacccaggacttcatgcatgctaagcaagtactctactactgagctacatccccagccagagacttggctttttaatctgtagaatgatgtggatactaatttcattaggttgatcaggatcctaaggaatcctgtgtataaagcttccatgcctctccgttaaaggtgctgtgtattgtgttctccttcaggacaagaataagtgtgcatctatcaaaggaatagaaggccataactgaggtgttgtcccatttcaaacttttgccagcctactctgtaggtccatttacagaagcaggtgaggcagacaagatacgagcttccatgtggacactgagaattggatttgggtccaccagaagagcagtcagtactctttaactgctgagccatctcaggcttggtggcaagtgccattatcagctgagccatctcactggccccctgcaaactatctctggccatagcagaatagctttaattctgcttgccagttgaggattctgaagcctagcaagtgctagggctgagctcataagttgacaggactagatttggaactcagtcctacctgattctaaagtttatgctgtttttgctatttcatcgtgtttgggggtggggtgggaaactaacaacagtaacaaactggattcccaaaaatgcctttttttttttttttcttttcttttcttttttttattttgagacaggatcttaactatgtagccctggctggcctgaaactatttagactaccctggcctggacttgcagaaatacacctgcttttgccttccaagttctgggattaaaggcctgtgccactatgtctgtcgaaagagagcttcttgacaaccaagagagcagtctctacttggtttctcagcaaggccagtattggaaacactcaaaagtggttgttgaatgtgagggatagtaattgggcagtaagagaaataggtataatcctatatcttttcattaatttgttgcagatacaacagagcactttcacattggttagctcatttgatcactgaaaagatagagggagatgctttctgttttcagaataagggtgttgttgtttgtagaaatcacatgacttgtttcaggtggtatgaacagccaagccaaagtggagccttatgcgtctatagccagttcagcttgtactttcatgtctctagaaagccttctgtggttggctagttgagagctggggtttctcatgggagtggaaatgtcagtgctacttgggaaattagttctgtctggccagtgatgatcatttgggcagtgttaatgagtaggggcctgaagagtttaatgagattaatagatgttttgtcacccatggctgcctggtaactaggttctctggactgaggagttcctaaacactgatccatctaattgcttggcttcctccagggatagtctcctatcactgacagctctttactacttgctgccctagggttatctgagggtgtaaaggcaggaaaaaaaccaaaagtaacccaacgtgattggctaaaactaagcagcattggggcaacaagaccaagagaagcagctcctctttggaagtaaacattccatgaggaacaggtccagtcctaggcaggtttaaacacgacttaattcaatctgagaggcaggattggaagcctaatgagggaggcatgacaaagttagagtcaggtttacagtggataagtctagactgtgtaatgtcaggtcccctcaatagctgtttgaccttacataaatcatataacttcaaaaaatcttcagcctttaaaagggatagggggatgaccagcaatgatattattttagccctttttgattctatgacaaaattgctgttttattagcaataaatttatttattcaagttctagagttcaaaatgaaggcatctggttaagtgtgcccatggttccaggacaggtcttttttgttgtgttcctacattgtagaaagaaaaagatagttctgaagaggctctttatttttatttatttttttattatgtatacagtcttctgcctgtatgccagcagggggcaccagatttcattcaaggtggttgtgagctaccatgtggttgccgggaattgaactcaggacctttggaagaacagtcagtgctcttaacccctgagccatctctccagccctcaagaggctctttatattataaaggtactaacacccatttatgcagagttggttcttatgacctaatcaccttctaaagactctgttgccttttgcccttagataccctgggggatatctgagtggtttggaaagaatgttgctatcaaagataaagacaaccatttctggagaagctaaccagtttccccaaagtatctactacctccttggttcacctgctcttggttaccaggcagctagggatggacagaaggcctgttgatctctaagctcaggctaatacgtgttcatgttggaaattaggtttcaacgtagaatttgacggaagaatgcagagcctgacagagatccatggcattcataaaagtcctgtgcaaattgaagaattgtagaaaggggaaggacaaggagggtgtgtgtgtttgacacagatgagtatcttgccctagaaactattaccttgggaatttttgcacacacaatctggcccctgtggatgcctgtatttgtttgttttgttttgttttgagacagacttgaattccatttgtggctttgctttattaacttattactttgtctcatcttcctatttaaagtaaatccttatgtgaagattaatgggaagagatgcaggaagcactggtactcagaatcagaggctctttttactgtaagaggtttttgggaagattctcaattacccaaaatttaggagttgggaggtaccttttaagacttttacatttgcaaagctctttggttttttttctttctttctagtgttggcttttgtgttctagatcataatttctatatgaaatgtttgaatttgggaaaatggtttgtgttttgccaaatttcttactaacttggagaagttggcccatcccttccagctgtaattacatttcaaagcttttgtccctggtggggtttaattagtttaaggctccagctttttagcagttgtttatctagcaagtgcaagtgaagacattggcctaggaggcagcctcctgtagtttttctccagcatagcagtgtttttgagatgctgtctttgttttctgctccatgttttcctggatgcccatctcacttaaaggaaaaaatataatacaaaaatcctgattttgtagggtgtgatagcctaggcctgtcattttacttgggaagtggaagtagggagatgaattaaaggccagcttgagctacatgaaactcttgtgtttaaagagagaggttgggagagtgtggggggatggagagggagagaggatactgaagggcaaaggcaaaaaacaacaacagaaaacctagattagagctagaggacacctcaaaccctgaggtttatggaccatggtatcctggccaggttctgctcctctttttttttgggggggggtctcagtaagaacatatcaccaaagaccctgctaatctgacgttacagatatctctaacaacacatgtggttgctgtatgacctctgccctccccaggcctaccacccacctctcctcagcttattgttaagcataaaaacctctggagttgttggtaccttgctcttagttacacaatttataaagcaaagtttggctggtagtggggactagcttatcaagttagatagtttttgctgaaaaggatattgatattttaggacccccactcttgaaaaattcagaaagaggctagatgtggtagcacatgctgataatcccagcagttgaaaagcaggaggatcaggagcttaagatcatcatccttcaggccagtcttagttatgtgctactttgcctttttctaaatgggggaaacaaaatggggtgtttattaagttgggggtgttggtttgtgagggtgggcatttggatcagactagaaaaccaggcctgaaagctagtcagtatggcatacacctctgtagcaccatttgagggttccacaactccctagacgtgcgtctctcttcctgggcttagggagtctacagagtaacatacagcctatatgctaaagcatcatgcaagacttaaaagatcaactgggaggatatagattgggggtttgggatttggacaccagagcatgttccatttagcaggcacgtgcatatacttggtcttctctatagatcagaacagggtgacaaggttgactcttcttggtatcctaagaatgtgctccagtctgatcatgactctaatctagagtggtcccactactggtggtattaatagaagagacaaatacatagaattatactaatagtggatcttgtaaaggcctccacagtttgcaaagttcttttatatttattgtcccaaagctcaagtgaggagagaaatgattggcagagccaaacctgaaagactgttctccagcaagccagtgagtgctgatccctacacagtactacacaaaggagctcagtgaatgcttcctactcagttgtgttagaggctcctaacagtctgagggaatccactactgccctgtctttgtcatataaatggcagagccagcagcctggttggttccctcctgctgaacaaaatggcatctttctgtacagttttgagcaggatcagtcatctagtgtcatgtaggcaccttaaaaagtttctttctattagtgaatgaacaaggaattaaccattgaatgaatccagataggaggatttttgtaactgaaaaatggggagcattaaatatttcctatgcttatggagagtatattggctgtgttcctgggtatctccttgtgtccttcactgctttataaatgttggtgtaagagtaaacctactaacaagaacctgtcttgtccaagttagttctaaagctcatatcagcctcttcattagtagcagcaagttaaactctgagcccttgctttatggtagtacaaaaagataacacatttctccaacttgcattcttacttatttctctgaaatgaaacccccaacccccagccctgtattaggtagaataaacatgcaggttgatgaaggtttttataccttctgcttggaggttatttaataccttctgaaactgccctaggagataagattcaagttgcactccgaacacgggcctagtaagtacaaatgccacaaccagactgcaaaccttgcctgctggaattaaacatcctctttcctttctcttggggcttatgccaaggtacaactgttctgcagagagactctgtaggataaaatgcctttttttttttttttttttttttttttttttttaaagccagagccagagtctacctggctgacctgaagaatttactatgtagaccaggttggtcttgaactcacctgcctctacatcctgagtgctgggattaaaggcatgctccattgtggccaacagaacatatattttaaaaagccaagtataggggcatgcacttgtaataccagtgctagagaaatcatgggtaggcttgctggctatccatgcctgcttactggacaaaagaacaagcgggtggacttggtacttctactgatctgcgtatagacacacataacaagagtagttgcaaacttgtttataagccgaatagattttgagtctgtataaagttaataactaataaattaaattactaacgaccattctcaggtaaattcattatcttaactatttaaattggctttaactctaggaagcagtgatgaagctgacagaaatgggctttaaaagtgtttaaatgcctcttattagcaagttaacaatcttaacaaaaaacaattagcagagtctcagtttctggtaaaataatctgtattcatccacgagttcttgggatcattcaatattatatgctactcttagcctacagtgagtacctggtaagtctatgtaagcacacgtttttgcagagtggctggcacagtaaagactttactggctgggttagtaaagatgaagtatatctagatcagacaaagcaatttttataataggggactgttcttgaaattaccatgtgttctccttgttatggttctgcgttgaaggaacagaaagaaaagctgtagaaaattatttagttttaaaatggggtaacattgtgattttttttcttttttttttcttttttctttttctttttttttttttttttttttgagacagggtttctctgtgactttggaggctgttctggacctcgctctaggctggcctcaaactcacagagatccgcctgcctctgcctcccgaatgctagattaaaggcatgcgccaccaatgcccggctcatttgtgatatatttttaaagatataaggttaaaaaaaaatgcaatcgaggctggagagatagctcagcagttaaagagccctgggtgttcttccaggggacctggattctatccccagcaccctcatggtgactcacaactctctgtgacttctagtttcccactgaaaaaacaccaatacacatgaaataaaaataaatattttttaaaactggagttaagagactggttaatcccagccttgctgttgactagcattgtgactttccagtgtagggttttcctgtgtacagtatcgtgagtaccaaatgagggaatgttgtaaagcacctagtgtaagattagcagccaggaagtggcaactcttgataatgtcaccagaaaacaggatgccagaacagggagaatgggtaccatagggttgagaatgtgtacaaaggcaaggagcaatccaggttagtcagggtatctattggccatgaacattccccgagcctggcctgggaacccagcttcacattggcgttatcttttcaggtggacaccatgtccttgaagattcagaccagcaatgtaaccaataagaatgaccccaagtccatcaattctcgggtcttcattggaaacctaaacacagctgtggtaaaaaagtcagatgtggaaaccatcttttccaagtatggccgtgtggccggatgttctgtgcacaaaggctatgcctttgtccaatatgccaacgaacgccatgcccgggcagctgtactaggagagaatggacgggtgctggctggacagactctgggtaagttaacctcttctgagtagctactgcctggaattttatgatttcaacagataaaaattatatttgtaattcttaaatgagtgccaagaggagaacacatggttatagagggcccctttctcctgtccttgctttcccaattcctctattaaaaaaaaaaaattatttgtttctgggcttgatggcatgtgctattaatcctagcacttgggaggcaagtggatctctgtgagttcagggccagcctggtctacagagcgagttccaggacacctagggctacacaagggggctcctgtctcaaaagaaaaaaaagtgtttgcatacatatatatgtgtatatgtcaaccatggttcctgtgtagaggtcagagggctagagttggttctctttccacctttatgtgggttcttaagaattaaactcgtgtcatcaagcttatgaggcaaacacctttcccccccgatcttcatagcctcctccccccacccccttaaattaaaaaaattcttaaatacaatatattttgaatatttttttcttccctaactcctcccagatcttacctacccatctaattttgttttcccccctccttctcaaaaaaaagagaaatgaataaaaacaaggaaaattaaataagaaagaaaaaaaaaagataaaagtgccaaacaaaagccccccccccaaaaaaaaaaaaaaaacatgggtttggtttttgctggccaactgctcctggtatgtggttgatagacccactggcaccccattggagaaaactgattgtccttttgcctacagatgtcggttgcaaatagcttcttgtttaggggtaggaccctttgtccacttaactccttttagtgctgcaacccagttagtcttgaacctgtgttggtcctgtgtgcgctgccacagcctctgagttcatatatgcattagtcttgtgtctggaagacaccatttctttgtagtgttcatcaccacctctggctcttacagttttttcctcctcctcttctgcatagatccctgtgccttgaggggagtggtttgatgaagacatttagaactgattgctacaaagtatcacaatgttcagttctgggtctctgttaattcctgtctattgcaaggatcagcttctcggatgtgggttgagcagtgcactcactgatctacccccatagcctcttaataacaagctttatggttccagctaaaatccaggttctccgtagaaagggaacaaaatgaactaatatagcctgttaccccaatctacagaagatatgagttagaaccctttctaaaagctatgaggagctgtgaatacaaggactaaagggaagatgcgtgctcttggcattattgattacatacatatgaaatgactgttggtgtctaccttacagtgtgtgtgtatgtgtgtgtgcatgtgcttgattgctcatatacgtctttgtatgtgttttagaaggtatatctatatgtatgtattagtgaatataagatatgcagatgtgattgcatttgtgagtgtgggagcagatgtgcttgcttttttacttaatagtccttgatcttataggctatgtatatatgagggtatagatgtgttcatatatacccgatttatatgaatttacttgaaaatatgtatttatatggtatgtgaagacttgtgtatatatctgaatgtatatgaatatacaactaggcagatccatatgatgtcctggtattcttgtaatgtttgaaaattaaatgtttaaagacctttggctacctcagtcccatgtgtacactgtgtaaatacacagaggcatgatggtgatgtgtgttggcatactgctgtcatgttagcattccaactctgcgtcttccctccacacagacatcaacatggctggagagcccaagcccaatagacccaaggggctaaagagagcagcaactgctatatacaggtgaggctctgtgttttttttttttgttttttgttttttgtttttgtttgttttgtttttgttttgttttgttttgttttgtttttttggtctgcattggttgggtccctcttttcacagagggagtaaatgctgatagtgacagtgtaccaagcttagaatttaggaagattttggagatgaggacctgtggagaagtgggctgagtagccatctccctttgttttcccagtggctacagctttgactatgattactatcaagactacttctattcgaggtgagcagggaaggggcatgtcaaggcattaaatagccaaactggaagggtcttaagagattgctggtgtggctcataaagtcctccaattgggaactgaaacacagagatgtgagtgagtctttgcttcagggttgcttcacaaatcagggacagtgctaggactaggatcccattttgtaagtgctcaggccagagctcttactgtcacaccaaactctcacattctgactaccttgcttcttcttagttctatagcgtaggggagtgtatagctaaagggtgaacacacctgggcacagtgctttcacaggtagtgcccataaactctgttcagtctttgtctctgtaaggtgctcactcagccaaaaaagtcagacctacagatagtttggtctgactcttatgactaagaagtcctagttatttggaagcctgcgttagtccatgatgagttgtgatctgccttctatctccaatcctacctacacttcaaccttgaagtcttctagaggccccagccacatttgtttgttgagaagttttaaaaactcattatcctcctatatctgcctgttgagtgcagggattacaagactaaacacaatgccagctcctggtcatgtgcttgactagaagttgtggtgacgattaaatcaaaaggtctccttccttgtccagacagcccagggaaaagaattcttctgaaccattttctctgctgtaagtgttaagtgtcataatctggaaattcaggagactggatgctaatctcggccgtgacactgaataggtgtatctatccttgggcaaattctcctactcctagtcagtgacataggcttataccaaatgatctctcgggacttctgaagttcttgagattccagggtcagagccatcatctccccttgtgggtcaaactgaaggatcggggattgcattcattcccagagactgatcactagttgccaccacctgcaggactctttgaacaggagtaccaagaagcaggaccttgagtatcctagtggtggcaggtaccgtgactcatcaaaaaagtagttgtagagtatatccctgatcaaggctgtgcttcccttcagaaccatggtcattgcacaggtggtgggagagttccctgctcagccttgggtctaatttagctgcccatcctcgaaataatgttgagcacttggcctatatatctctggagaaaaagaaaggtgttgaaatggtccaaaagaaaaaaggagcttagaagtctgaggccatgggttcctcatgagtgcttcagtgccctagtacccagcttttgtttgtcaaaccttcttaagtgtttttagtgaggttctcatgctctacccttcctgcatactcaggtagtcagtgaacttggacagccctcttcattaagtagatgggaaaactaaggttcaagggttggccacccattttcaaacctctctgtttccaggtggagactttcactgttttgatttttacagtatgatcagatgaaggtggggtgattatctgagtagaaggcggtgccttcaggaaaggctccttttaagactgggctgtttgtccttatactgtttctcctagcatggctggggataaatctgtaggtgcaaacagtaaggttttctttcattagcctttaggatctggaaaacccctttcatcataccagggcttgttggaatcattcacttcttccctggccctttccggtcacacaggtgaagttagtattgtagtgcctcctggtggtcacaggccatgctgcagcctctggtctgtttgcctttgcaggctgtttgattatagaggccgcctttctccagtgcctgtgcccagggcagtcccagtgaagagaccccgtgtcacagtccctttggttcgccgtgtcaaaactacaatacctgtcaagctctttgcccgttctacagccatcactactggctcagccaagatcaagtgtgagtgacttttgttgttgttggtttttgttttttgagacagggttccactgtatatctttagctggcctggaatgcactatgtaaatcagactgatgtaaaattcacaaaaattcttctacctctgcctcctgggtgctagaattaaagatgtgtatgccactacatcctgatgacgtctttcaatctttctagatttttgaacccctttggggttggatatcagatatttacaattcataacaatagcaaaattgcagttaaaaaagcagcaacaaaataaacttatcgttgggggtcaccacaccacgagggtcgcagcatttggaaggttgaaaaaccactgttccagatggtttgttttttattatcactaaaatgatagaatcacattttttaacaactgatttttaaaatgttaatctttgtttttattttaagtatgtggtgtttgcctgcatatgtctctgcaccgggtatatgcagtgccagtggaggttagaagttacagttttgagctgtcaatgtctgtgcttgggatcaaactcgggtcttctgcaagggtaaccagtgctcttagcctctaagccatctctgtagcctccagaatcatactttattaacactgagaaaggagtaaatctgtagttgaagttactcttaataatcaagtgtttggatgcatttctaaagaaagtccagtgctgtggtatgatagtgttttttctctagtaaggataagttcagatttattctggtctttgtatactgcagtcagacacccaggaaatctaattgcagaagaccttttttgtacctttaaaaacataccacatcctgtaacacagctaaaaagacactccattacttaggtgttcccagaacacaccacagacctacattgtttttctttttgagacaggctctcagaatttaaaccagattaactttgaactcacagtatccctgcattagccttccaagtgctgggattgtaaatgtatgacccacatggcccagtcctatattcctgtgtatttgcagtccctataggatgggagctctagggcaaatgacaaggatcggattatgaactggtcacccctggggcccgttggttctctcaagaagagacccttttccttggcaggaaaagaaccaaaaaggaatggcttccctagttgatagaatgaagctggggttttgtttgcattgtacccctaagtgataaccctgtctcccctctactcccagtgaagagcagcgaactacagaccatcaaaacagagctgacacagatcaagtccaacatcgatgccctgttgggtcgattggaacagatcgctgaggaacaaaaggccaacccaggtcagctttgagggcagcccttgggaagatagtgtgccccaagggctagggatttgaagctccaggccctgagacttgatatgtagtgaaagcccaactttcacgaaggtgtgctgcatagctgctccagctgatttctagtcctttctacttcttttaccctcaagatggcaagaagaagggtgacagcagcagtggtggaggaggcggcggcagtggtggtggcggcggcagtggcaatgctggtggcagcagcggcagcggtggcagcagtggtggtggcagtggcagctgcagcagcagccggcctctggccccccaggaagacacggcttctgaggcaggcacaccccaaggagaagtccaaactcgagatgatggcgatgaggaaggactgttaacacatagtgaggaggaactggtaagggcctggctagctatgtgactcggaagggctagagctgtccccctctgagctccttcctttctgctttccagagtgccagtcctatgaggagtagggaagaatgagcagcgtatagttcattgtttgagctgctggtccgaagtcccactcaatactagacagacctcagcaaagcccagggcccagtgcaccttctactctgggtgtattaaagaggaggagaattacgcctaagagttgcacacacaacctctcaggaatggttggtgttgatgatgaaagccatgagaagatgggaattttaatttcacatgagaattttctaaaagccattgcctttcaagcatctagcaggctgtctcttaaaggagtaaactcctgtatatatgggaagtattcagggtgaggttaggagccatgagagggcctaaattgagtgaaaaggtctgatttctttcaacactcaagatgcctgctacagtgtttgctgcttgtttagtgaacacttgagttgaatatcacactttaaccttaacaatagattagattagaatggccacatttaccttgaagaagctgaagctcaaagttaccaggtaccttgctcagacttggtctgtgataggtgtaagtcctcctatgccacacttgtttttcttttctttcttttttaaagcctagcctggtacttcatcttattctcttaggcatagtactctcagtaaaagctctaaagactctgagttgggcagaccactgatctatatggctttaagctttgctgtagtccatggtctttccatgcatagaatgtgtccctgttacactagcaaatcccaggactggtcccttaactttgggatcttcagataaccctctcaggattctaagccagttttattggttggttccctttagttggacctcctttccagcagtcctctgagccacaggacattcctgaacagatagcgcagggtagaacttgtgacctacggtgaatgatttgtgcttgtcttcctcctctcaggaccacagccaggacacagatgcagaagatggggccttgcagtaagcaggtatggggtgcctagggagcacaggaaatcaatgaagtgatttcctgcaatttcttcctgatgtgggtctagggagccatactgtgccgaggctgaaggtccttacatgcagccttactgcagtgtagtcacacaaatcaggaacactcagagagtgttctcttgggagcaggatgacaaggaaggaaaagtgtgaactggagtggtggaagaaatgctgtgcagcttagtctgcctcttagtgagggagaagcattccatagggggagagaacagacagccttattggagcacagcattgtgacagtctttaaggacaagagctgtctgttctgtagcccagccctgcaaggtaggggaaaggtgccatttgttttaagaggggatgactagaagtgtctcattccccccttccctcgttaggtgttcaacttgatcctgttaaggggaggagacgccctgcaagcttttatggcaggagctgttaatctgatctcttctaccctgcaagattaggattgtgtgtatatcctagaagtgggaatgcagatgttgaagggtagaatgaaacatcagcatgtctcatgagattccaagatagtaattgacgcttaaatttgaattcagtaacatgcagccccaaagcctccactctggccactgtctgttatcctgttattccctaccctagaggagtttacaggtgacagagaggtgctttggtagataacacatttgtaatataggatctctattagttagagcttccagattagttcagaaatttcctcatgtaagtcttccctcttgaaacttaatttatttttacccagaagactatttatatattgtgcagctagttcatgttaggttttaaaggctcaggtggggagatcgctccgtccaggggttgagcctttcccacaattaattacatgatcagaaaattgggaaaggtgcagacatagcaccgcaccccttttccttacccctatgatcagagtttgtctcagccttagtttcttctttgccttgacaggaaaaatggccaccagcagaagaagggcatcactgtctcaggcctcaagtcaggcacccatctctggatgccagtttgtagtgggtaccaggggaaagctgccagcnnnnnnnnnnnnnnnnnnnnnnnnnnnnnnnnnnnnnnnnnnnnnnnnnnnnnnnnnnnnnnnnnnnnnnnnnnnnnnnnnnnnnnnnnnnnnnnnnnnnnnnnnnnnnnnnnnnnnnnnnnnnnnnnnnnnnnnnnnnnnccttccccagggcatcccagccagtgagtgctacgtcctttgcaagtggagttactggcctacccttaccccatgcactcttcctgtctgcactgcctgggccaaggggcagaacacattctgcccttcttccccagggaattcccaggcttggatttttctataggtttgaggggggtgggggtgggggtggggttggtgggtgaggggaaaatgacaataaagagattggatccaaatatggtcagatggaatggtttgcttatttggctggttttatttacattgttattgtgcatgtatggtgtggggtgggatacatttgcatgtcacaccatttgtggaggtcaaagacaacttcatggagacaggctttcgaaggaaacactttacccactgagccttctcactgtctctacttctatgataaaacactatgaccaaaagcaagttgggggaagaaagggttaattttatcttctacttccaggtaatagtccatcatttggggaagtcagggcaggaacctggaggcaggaactgatacacaggccatggaggattgctgcttacaggtttgctcctcatggtttgctcagcctgctttcttacagtgcccacattggacttgaccttcccacatcaacctgcaaatcaagaaaaggcagcatagcccagtctgatggggaaattttctcataattaagcagccagcacacaggcctgtggtttttctcacagtggtattttagccttctgcctatcaaaaagctggtatgctcaacccttctgttctcccatctccaggaaacactgtctccagtgtccaatactgatccatttgcaccagcactcctctgctaaaatgattaaagttaggtgtgatggcacatgcctatcatccaagcacttagggaagtggaagcagaaataccagttcatgactggtcaggactccatgagaccttattttatctcaaacaacaaaaaacaaaagcccacaaatgtatctgccatttttggagtacctatgcaaacactagaatctaaatcgctttaagcaagaagtagctttattcctttcctaatagtatgtttgtaggaattttaaattttaagcttttcctttttttggtaaacttaagccatctgttctaccctattactgccgtttttgggttgttaaaatgttaaaatgacactcaagtcgctgctttgacctggctcctttttccgtttttggaaatgcagccttgattcagctgctgttctggtcatttcagggatgtttcagtactagttgattgttcttaaagaactaactgttaccttcttggaaaggcctcacctcaggacacaagaccatcatctaaaagggtgggggcctgggttcttacttcgtttgcaaccctgccctactggattccttattgaacgctaccagttctagccaccagtcatacagcagcttctgcctgggttttgactcccaagttttggtagaggccaggtgctgaaggtgggacagtgctcaggcccccctggatatggaaacccctagaaagtggctcacatcccagcaacacttgtatgagtggggctttttaggttgtctttgtcatgtagcccatgctgtgcttgaagtcctgcagtcagcctgaatgctgggattacaggaatgtgcctcacttttgtttcagctatactcttttgcagtattggctatttagagggtgtttgttgaagggaggatagagatttcacaggtgttctgctaaattcttttttgtttttcaagacagggtttctctgtgactctggaggctgtcctggaactaggtcttgtagactaggctggtcttaaactcacagagatctgcctgcctctgcctccccagtgctaggattaaaggtgtgcgccaccaccatctggctctgctaaattctataaaaggtattgtttatcccctacagtctcctagaagtggtgatagatcatcctgttaacctactggaaactgacatatttgtccaaactcatgtcacttgaattatgcaaatctccacttgcaatttgactctgaagtactgctcctggattttgagtctcttgggctttcctcttctgtacattgccagtgttctttgacttcctctaatgcccgtgcctctacccttttcctttatggaacctagcatatggcatcaccatactctgcagcagctccactgtactatcttcagtgaccagagtcatcctaccctgtccagccccatttggtctttttcttcatgaatcctaacctggacaatggccatcattccctaccctgccaatttagtccacatcttctactcctaatttttccatagtagtctgaactttaactcagatatgttcaacttcttgacattctaacaagaggttaccatctataaagaactatgtgattaagttacataaagggaaataatcatgtttttaaagtaagcttgtaattttgttgtaccacattcacagccatctttgactggctgcttgctggccctttttcatattactttgatttttaaaaagtttcatggttactataacaaatatacagtctctgaggacaaaagagggcattgggaactggagttagatagttgtgcgctgccatgtgagtactgggaatcaaacttgagtcttttctaaactactgagccaccttaccttttcagccctagactctacattaatctggtctctttcatattatgcaccagggctttgctgttctgccttcctcccattttttgagatgggtctgtcttaaaatcaatctgtctttatctatttaatctataccatctatacccaggctggctatgggctcttgatggtattgcttaggtctccaaagtattggaggttacaggtatgtgctatcacactcagttccccaatgttcaccaatatgaagttgaaaactatcgtttaaatcactagcagataccaaccagtcatcaaaattgccccataccatcccctaaggaggcccaccaagaaaagaattggacagaacatacataaacacacaaaagtaatggagcactagttacacaagaggcactgatccttgctttattcatgaaataataaccaacattgggaattaggggcagaggtacaaaagaatgaaaaaaagaaaaagaaaaaattgcagtcataacagttgtgatcaacatggcagtgagtggtggcaggcagttcagccagcgtatggcacgtctcttgacctacttggtcaaggggaagtgccctctaccatttcacagccaagttacttggtaacacctggccttacttgaaccagggtcacagtaattaaaaataacattgtcttggctgagtggctgttcttgggatgtttagcaagattaacagtctgatggcaggaaagtgaggagcatcatgtatgtccttatcctggtgggtgcaagtaaggcagattatagcacagacccacaaggtggaccctcctgtgcaccgatggagaatacctcgctagctcagtcctcagaagcagagctggaggtaacagcaagaccacacacgcagcagcatctcttggtttcacagccacattcaagttagtttagtacagaaaagcatttgaggggggtcttttactgacctagaacacaggttggagaagcttccttaggtgctgctacttagaccctaagatttctctgtactacacaagctttctcaacaaactaacattagtatgtcaggtataggatatactggcctgtaacaagaattccaaagacagggaacctagcacctggtagttcccttgagtgacaacagctgaagtttcagctgaagtcggtctcaactgttgtcacaggagggaaatgaggaatcggcagtgaggtagtaacaaccctcacaaaaggaaagaaaactttcattctaaaaacaggctgatcttccagccactcaagtcatatctgctctagccatgtaactcaagagaagttgaaagggaaaatggctgcccagttccagtatttgccaatactcagtttctgaggacagggagaacttgccaaagtccaggaaccaagttggttgttttgtattttgctaaattcaacgagcatttttattatagaaaaaaaaaactgaaggacagatcaaattgaaagaatcagttataataactttaatttatcttgcactttacagaagtctatgaacgattttaaaaagcacctccttaccccatcacgtttgacagttgttaaagtgggcaatgagtatgtcaacagcttgagtgtcggcatcttgcaagggtttcagatcaatcacttgccaaagaacttggcagcttttctatcttgtgtttcaactcagtggtacgtccactctgatggtaacctgtccagccaaatctccaccacacattttggaaaaatcaatggtgattagcaaattagttagctttggcacggagctgtgctcgcttgcccgtgacagcctggaagccagttttgatgctggcaacagagcatcgagaatgacaagtttcacactgtaagaaatagagtcgggtgtccttctgtaggattgtgtccggtgatcggcatgtgtgacaagtgacgtattcctctgcaagaaaaacaacacagcattatctgctagatacagtaaggcagaggctcctgcttgcccacagaaatgcacctgtctccaagtaatagctcagaggacagtttaccctagccaggcagggaagcctagctaaacagctattctaggggtaagaaaatgcaaactaagctgtctgccatgttttttggcagtatgatacaagttgaaaggacttcaaatgctccaattagggaagtttgccagatgcccattcttggtgctatctatggataatccacttaagccttaggtgagaacaggcaaggcatgccaattttaaatgttttgataacaaaagaggctgaggcaggccatgccataaccagaggcaggtctttagccccagaatcagtcagcagaggctgcatcatcttggctttctgcctcctcctcactatcattttctgtctttccctccagggtttctttatgtagaccaggctggcgtcaaactcagatctcttaagtattgggactaaatatgtgtgctaccaggtgcagccccattgctttcccaggttcattacaattggacctcctcaaaataccagtctcaagagaacattcagaatgatacgataaaattcaattatacacttactgatatatcttctcaagacattttctatttgtttctgttggaatcttcctttgattacaagctggttattaccatctatagaaccactatgaaagaaaacaaataaacccattacactttggttcattttcctgaaggagcccaattccagcaccttcatacttaatgaacttaaaacatgttcaattgtgtaggataatttctggggtgtgtttctggttcttcaaattttatttctattttttagcgacaggaattggtgtgtcctaggctggcctctgccttccaagtgttaacattacttgagtgagctgctatacttggcctcaaatttttttaaatatttctatcttttgcaaagattttattcttaattatgtgtgtgttatctgtatagagttatgtatgtgcatgggagtgctggtatcttctcttaactgctgagccatttctccagacactcaaaattattgagattggatttccttgagtagtcatggctgtcctggaactcactcagtattctcaaattggcctcagagatccacctgcctctgcctcctgagtgttgtcactatcaggcttctcaaaatttcttactttaatgacgtactcatacttctttttttgggggggagggggcagcttcgagacaggatttctctgtgtagctttgcagactaggctgtccttgaactctcagagatctacctgcctctgcctcccaagtgctggcattaaaggcgtgcgccaccgccgccgccaccactaccaccacctccacccagctgatttactcaggtttcttaatatttagtccaactttagacttgtaattgactttatgtccaaagcaaactgatcccttaactgtgtaggtttgattgcctgttcaacttaaaaaaaaaaaaagaaacttattgaatgcataccaactgcaaatatgagggaggtataaacataaaaaagttgtacattatttttaaaattctgaagccaagcatggtggtgcatacctgtaatcctggcatgtaggaggcagaaacaggaggactgccactggtttactggtttaaggcaagcctgaactacatagtgagaccctttctcaaaaatcaatatataaataaataacctaagccagacacagtggtgtgaaccaataatcccagccatcaagtagctcagacaagagagcactacatgagccgagcctatgagtttagagcctggttgggtaacatagtaagaccctatcacaaaataacttaaaattaaagcactacagtttgatagtcacatacaaaggcacagctgaaaatatactcaaattgtgagctgtatgtcaaaaaactgttacccaaaaaagtaaaactgaaattcatggtacaaactgtcagtgataaactcaatgattaaagcagctgacaaacacttgggaaagtaaagttagacattgtttgttaaaaatgataaatcaagcaaaacaaaaaaagataaatcacaacgtaaaacaaaattaagtcttacagttgaatttatatttgttcctatcttaacataaagtggatttttgcagaaactgattttcctgaggatttactatcacataccatgaattgtaatccttgatccctccctatctaggctaccctgactccaatgtaggacatttttcactgtccattaagaaatgggaattttgcccaactttaaaatatttaacccactgaccttttgttcaccctagtcacaacctgctagaattaccacacctctacaccaagtgcaggttattctgagaagtaaagaaagacttggctagcttttcttatgcttaaacaatgagtataattaaaaaccattactgtaacaatcctctgataattaagatgaatttttttcctgacacaaaagtagttcttctgaagtgtcaaatattactctttttgcacacagtttcttaccttgtacccaattctgccaataaaaatgcgaggagatgtttgggttgacgatgtaatctaaaaagaaaatcaaatacttaaaatctttcttagaaatcctaaaacaaagcagaaaccatgctgttcattatttcactgtgattactcagttattaggagtctcagtgaatagctcacttgtgcatagaaataagtagcactggctataatttcaacacccaagagactgaagcaggacgatcaaccttaatttcaaacccagcctagggcagtgagtgccagtttcaaaaacaaacaggctggagaaacagctcagtagttaagaaaattagctggaaaaaaaagagaaaaaaaatttgctgttcttccagaagatgaagtaggtttgattcccagcacacacaaggcagctcattcatctataacttcagatccaggggaatctgattccctcttctggccttgtaatcaaccatgcatgttgtacacatatatacagacaaaacacctttacacattaaaaaaataaaaaccaaaaaaataatatatgctactttgtagtttggtactcataaactatttattacatgctatttctgtttttgtttttttgagacagggtttctctgtggctttggaggctgtcctggaactagctcttgtaaccaggctggtctcaagctcacagagatctgtctgcctctgcctcccgagtgctgggattaaaggcataagcctaaatatctaaaatcgtgaaagcataactttaagatcatagttaagctatgattatctacctaagtgaatttacatataacctttcatttttgtactgtatcttttctaatttctagtgaatatatactattgctgccatcaaaaaagtaaagtatgctgagtaataaaaatggattacctagccgggcgttggtggtgcacacctttagtcccagcactcgggaggcagagacaggtggatctctgtgagtttgagaccagcctggtctacaagagctagttccaggacagcctccaaagccacagagaaaccctgtcttgaaaaaccaaaagaaaagaaaatggattacctgttctgtaacaagcaagtatgatttatgaaattgaaaaaccaacaataggataaagtgggtggctggagaaaacttgccagaaagggcagtaaccccagcccagggtgcaatggtgaataaaaactaaaaatctcatccactgggtcctaacaatccaggaagcttcaattcagcttagagttcactgcttacttggcaggacaacccctggcttgagaattatatccagtctcttcattcctgactctgcttaggagctactccatccccaacccaccatgtgtgttcaggtgttttgcctgcatatcatattccctggaactagagttatagacagctgtgagttgccatgtgggtgccagagtcatctctccagcccctaggatctactctcattattcagtattgacttacctttagatgccaatataaaatgagctctgataggcagacatgaactgtgacttccctcaatctatgccctatgtacttttatgtactttttcaacctacagaaaaaatgaccataaaaaagaaaatgtggtattcgaaatgaatggtctccactagctcacttacagtttacagatatctgtaaaattgacaaaagaagttttcttggttcctactcggacaacctgtggaggtttcataacaaatttcctcttctctccagcaaccatatccggattcttttctctcatgatgttgaacactcggttcagcaactataaggaatgggaattcaatcacatccttagtaatagcaagagcataaaacttctatttgggtcaatttgccttaataaagctattgaaagcagcagttcattacttactaagatctggcctttatggatgatgctcagttactctactgattttacaggaaagcatgtgacacaggggaaaaactgaagaaaccacaaatgagcaaactccagactaccctgacctcaaagtggacacttgtcaccaaggtcccactgattcccagagggctccatactatagtgacagccacactctgagcaggctgccccataagttggtatcaggaattgccatgcactggccacatggcctactataatctggtttatctccaatctgtatctcagtggctcttccaatgcagggggatctatacctacttttctctgagctcaaatgatagccaaaaagaaaaagaaaaaaaaaaaaaagattttgtctcacctcctcatatgtatagtctctttctgagcctgcccaagcaggcccagtctggttactgaatgaaatgccatcgtcttttttgctgtcttcatcttctaaagctagagataacaaagagtacgaatgagcagtgggctttgatccaacaagggggagttcagaactagagaatgaaagctacagaaacttcccttccctttcaaagtgatagctgcagtagcttcaagtacaaagggaccacacagagaagccactttcctttatagacaaaaatattacacttcacacaagatctttaatgagacatccatgataacagtgaaatgtttcttgacaaatacaagacaagacattaagtacttaaaggagagtccaattgttttcaaacctttgagaaaattgtatatataaaacccatctgtttaactatgctaaaaaaaaactttttaaaaacctatagcatataaaactataaacattaaaaattttaaatacttaaaactcaattacactaattttcctgtgtgaatcagatgatttttctgtatcatttttatcatactttaataaaatgaaattgtttttgtctagcattatcaagttaagacactcttgtcagatttcattatcatgcagtggaaataaaaggcaagacaagtattttctaaaagctcctcaagctagtcaaggagacccagatcaaaggcttatgtaacttaaaaacaggatgttgagttcccaacattaccttcgtctttttctagtatttcatcttcatctgggaatttgacattcttctttttcttctttttattgccaagcataatatccaggtcatcctctggctcagctggctctggagcatcactttcaatcttaagatcctaagaaattaaagtacgtctcaatattttgatagtagattttttgttgttgttttttgagacagggtttctctgtgtagttttggagcctatcctgacactcgctctggagaccaggttggcctctaactcacagagatccgcctgcctctgcctcccaagggctgggattaaaggcgtgtaccaccaatgcctggcttccatcctgtattttattcatactaaatgtttagaataggtaaatctacagaggcagtagattagcagtagctgaggctaaggttggggtaactgagaagaactagaaagtgacaaagatcatgggctttgttttccagaggatgtaagtcttcaaatttatgacagttacagaactctgaatctgctaaaaatcatttactttaaatggatgaattatatggtaagtgaattataccttaataaactttcttgcttcaaagtggtggtttcaccactgcatttgcaggtatacttgttttgccctcaaccgttctccatccctttaaatttctaaatatgacagtgaatggaagcaattttcctgacaccaaatatataattatttttttgcacatttctctaactctgaaatacaaagtaggtataatacttattacttggaataattaatcagataccctatgtttaaaacttggctttatagtttaagggctttcacttcagacactagtagtttcacctacacttttgctaagctataaattcaaagaccttcagcctatattgagtaatttgctaaaactcacagctctcagcaaagttttattgatatatatatatatatattgaggaatagccaaatgaaaataatgcatagatgaagctatgaggagtagggagttgagaaggaatcaagaaaagccaagtatctaaacacgctaccctatcatcacttctgtggggttaccaacctggaagttttgtccacattgtccatccacagaagtagcaggggccattcaaagttccaaaccttaataatggatcttcctagtgtctaaccatcccgagagactatacggacaccagatttctcaagagcaaaagatatgtattacctttgaagactgcaaggttttcagaattgaacgtggggtaccagagctaaagacctaattactttttattatatttatcacatcagcttagaaccaaactatgaagaagttaccgggcatcagttcaatagatgatatcatgaaagagggaaagacacaactcatggggaatcagtgccatgtgacgaacggatagacatgatacagcctgactccaaggttacttgcttacttgctgtaggcttgaatgtgaaaaaggcacattaagtcctaagagatgaatcataagctccacaaaagaacagaggctcagcctgtttcttggcttctagtttctgaccagcttatcctgctccctaacccaacatgatcacaattacattttttgtgtgtctatgtcttgaatgattatttacaatggctatagtaataatttcacagatcttagcagataaactcaaatagacagggataagtaaaactcaaacatgatatcttaaatctagctgtgtagttttagtgccatattaattaactacacgatactgtataggagatcaaacagtgacctagtctctgtgatgatgatcagtaaatacatacatcagcaaggctgtagtcattcacactgtctaactaggatacttgtaacatccttttagggtataaccccagaagcagagaaaagagtatcacagcatttaacagaaataggaacccatcagtaaccttttgggacaaaagctactggaggaaatcaaccaacaaaagtattaaccaagattacaatcatttaacaccaattctaggagagtggatgccctcttccagcctctgaagacactgcatgaatgtggtacactatcacatcaaacacccatacatacaaataaaataatccccccaaaatattttttaaatagtctaaattatccttgaaatacacctctgggggaaaaataaaacaaacaaaaaccaccaataaaaaaatcttactcatttcaatgcaaagtaagcacacagactcaatttgctgaatggattgtcatctaaactacgaccttgtttccaaacagattactgagtaaattacttattacatgcaggcaatacttcacttacttgggtttgagcatctaccaaagaaaaacttcagtacatacagtaaaacagagcccttgatatgtgactgttttcttttcaatatgaacatattttgtgaatacacagacacatatacacacaaaattactatatgctcattttataaataaatgtgtgggctttgttaaagtgatttctgcatagagcctctgtgtatgtgtgtgtatatacatgtatgtatcagtatacacttgtccatgtttgtgtgtagagagaggcccgaggttgacttttggatattttcctcaattgcttccccatgttatttttttgactgtctggactaacagtcagtgagtccagggaactacccctttccactctgcccagggtcagggttacaggtgcatgctggcaggcagggttttatgacggtcctggtgatccctcatggttgcccagtatctttaaaatggtagctcttgagcaaagaagaaccatctttcagctactttgtttatccatctaccctcctattcaccttcctacttaactacctacattttattcaaataattttcagattttgtattggaaatcaatctaagaggatgacaatcacagggaatcaagtccttacaagatcatatcagagcactctccacagaatttcccagagaagcctaattttcttattgaatctctgccatcagctaccaacttctgcactgggggacattctttgctggtactaaaatttctcagtcacagagacacctttccttagctcaacaattttaacatggttaaaaacaatgtgcattttctgagtccattttaatgacacaatacaataagacctaaatccctctgaacacagacacgcacgcacgcacgctttttttcaaaacagggcttctctgtgtagccctggctgtcctggaactcaatctgtagaccaggctggcctcaaactcagagatcagcctgcatctgcctcccaagtgatggtgaaggattaaaggcatgtgccaccactgcctggctcctattataatcttttataccatgtagtcagatacattcctaggaaaattaccttaatagtggctaaatgctaaacaaccaaagcaaagctactaagagatgagatgaaggaggaaacagctattagcagcctttctagaattccaattttaccttcaataagaaagctacactacctttacaccttcttcagcttcatcaatgtcaaatatcttttttgtttttttcttctttttcttttgattaaagaagttcaagtcatccaagtcatcagatgcatctaaaaatagattaaacagatttccagttattaacaattagaaagcaaggcaccaaattatgagtcacaccaactcttttcatgtattcttatggtgtcctactgctaccaccaaagttatggttctgaaaacaatgacaaatcaactcaaagctttctagaaaaattgttaggggccttggctgagaacatcaaactcaataatctgaccatgtaatgacagaaagtgctctctggcacaatctccagactatccaactgtatctctttacttccctctgttctcaccctccttctatccctcaatctctggctccagctctaccaaagcagtggaggaactaaggcttccacaacaactgtgactgacacaactactcaccctttttcctactgtcttcttcatcagcttccacatctttgtcttcagttggttctggctccacttcttttgtttctgagggctgggtttcttctgtctgggcatcaccttcttcatctaacataaaaggcttcttcttcttctttttctttttgctcatagtaggatcaaaaatcatctgtttaaattaaaaaagaccaagggattattttcaatgatgctcacattccaaatatgctttattctttttcttcttccttttttcccccccaagacagggtttcctggtgtagctttggagcttgttctagaactagctcttgtagaccagagatctgcctgcctctgcctcccaagtgctgggattaaaggcatgtgccaccaccgtccagctatatgctttattcttaaaaaactggatacattaaaatcccaaaagggggtgctgggaagatgccttaaattataaagccacttgcccccaaccacttgcttgtttgcacactttctaattcaataaaagacaaatacagataaaagacaaatacagacaacaaaaatacaaaacaaaatagatttacaaaaagtccatctaccctcttttacattattagacatggggagtacctcacacatgtcttctaatttataagtcagcacaagctataaataacttcatttttattttcatgagcaaatttggacctgaatgaatcatgaagtttagggaaaggaccttagcaataacctatgttgcatttctgattgatgggtgagatcaacaatgtctaggcagataatctagagtgactaagaccaggtgacctgagtcttagtttttaaaatttttatctgctgagtagtgtttggaggagctggaggtaaatacaatcaagatatattgtaacatatatgaaattgtcagagagtctagcagtggtggcacactcctttaatctcattactcaagaggcagatctatgtgagtttgagggcagtctgcagagtctacagagtgagttacagaacagccaggactacacaatgaaaccctgtctcaaaaaacaaaaaggaggggatggagagatggctcagtggttaagagcactggctgctcctccagaggtcctgagttcaattccccacaactacatggtggctcacaaccatctataatgagatctggtgccctcttctggtgtatattcatatatgcaggcagagcactgtgtacataataaagcttaaaaacaaacaaacaaacaaaaaggaatcaaagagtaaataaaatattgaagttcactgcaattttaacttttaagaaaacctaaaaacaccaggcagtggtggcgcacacctttaatcccagcactctggaggcagaggcaggcaggcgggtctctgtgagctcgagtacagcctgatctacaagagctagttccaggacagcctccaaagccacagagaaaccgtatcttgaaaaaccaaaagaaaaaaagaaaaagaaaacctaaaagtaagaaaaatttatcaaattctaataactttctacttgtaagaaaatttcctttattgtttttgttatggaatgtgaaatgttcacaagctatagaacaagtgaaaaattaatttctaaccagtagattgtttgcaatgatcccttgaaagagtttgaacatatagggcatattcctgctattgaagaaagcaaagtctttaaacagaactgaatttgaatacaattttttttttcccttccatgcttaaacttagcagtttgttcatcgtgtagtggccaaaagcacaggtctggagcctcattaccttgagtccaatcttgtctcaaaacagtaaaactttaaaatttttggcttgaacatttctgaattcctgacaccattagggaatcttccccttctcatcaaggaacattcacattcctgtgacattttaaaggtaatgcttttgctaggctaaaaggaatcatgttttactgagtttggggcttaatttccctgtgtttttttttaatgtgtttactttatatcaagaaatcatttaaagaaaagctactttttaaaatagactcttattctctatcctgcctaccagtcagaataatccattctaatgagatttataagtcacttccaagtacagattttcagttaatccttaagttggcagtcataaggggtttgcctgtgacacttctctagtcaaagcactaggtaaaccagaatcacatcccatgttcatcccccctctctatcagtaaattccacctgagaataaagccaaaggaaagggttctggtacccttcaatttactgcatggcctaacctccttgggccctaatttttaatttataagtctaaggatcaagctacatactttagatttttcaagagactgctgctggtatgaaagctgtttccaccatctctgcttgatcaaatcatgttcattctctagaaatgaattcttaccccacacctttcaaaagatctcattataccaaaaaaatgacctctcaacccccccttcatcactacaggtgttagctattacctcttcctacatacaccacaagcactttgccatagatcgaatacagcagtttacaggcagttatttttaagttattaagtttggaacatgagtagaaagaaaacaagggtgaaacacttcctctcagaacttttctaatgcatacataatacagcagctaagagcaatgtctactatctctttcaagcaagaatcatctatcatctccttcagactgaactacttagtaagcttgtgagagcctcctggtccatttacatggaggcagtatcgcacagatctgggattgtactactggctcagccacttggaatttgattataggcatcgtacaactctagttttctcatttctaaaatggaccttatttaaaggaactgtaaaaatcaataaaaaataggatttcgtttcctccagaatcaatctcaaattcctcaatgcagttttctaagccctccatgaactagcctgtgtctgtttcaaccaacctggtgaatacttcactttctttaagtactttttcctttcttgaccataaatgccttgtaatccattttctcactggttgagaaaatcctgatcctctctagagtctactcaaaagccaactctgtagcgagcccccaactgttcctcttgcccctccaactgtaacccctttttaagtcgtttaattttatgtgaactaggataaatcttggagggcaaaaagttaaaacaggaaagggggcttgattcaagcccggtggagaaaaacccagtcagcttcgaagccggacttccctgctcgcttcgcgtgttaaaggaaacttagggactcgcgcccggaaactttcctggaagggtggtcaccttttaagactaaaatatcttttcctctggccctcacaccgtgtctaagaattaaagtctcgagcgaggaaagggaacgagattcgcccggaaaggccagccgacaaagtttttaaccacggtactccaccggaaccaagggaagcttctcagggcacctgagcactgggcaatgagagctgcggcggcagtgtctgaaaagatgccggggccgccggccctaactgggtttaatcgtggaaactaactcggaatccaaaccctttcagagagggcgactcaacgtgcttcccattccgaaacgccgatcaccgtaggaggccggcctcgacgctctcgccctgaggagagctgggtgcggccaaggccgaggatccggagtcctcgtcggctccacagctccgggccgcttaggcccggctgctcctccacatggcggccgcccaccgctaggccgcaggcccggcttcccacaccggtgtgggttcggcttcctgcctcagtcctcagctctagctcggtgctcaggctctcacctcgtccccggacatggctgcggttctagtgggttcggcaagggtgggacgtcagaccggtcagcttcagaccccggactcggcgaagctcctaccgacagctctcccaggcccgcgctaggctcttgcatcagcgaaagggaacgacaccccgccctcctcccaaacgttgtaagtgcgcctgcgcagaactcgccaacgcgcaggcgtgcggcagagagaacctcgcgtgttgcttgtggcgcgagttaccaggcgacatcccggcgccgggcatgctgggacttgtagtttgcctagaagaaaagggcgcttgagctacagcagtttccgaggccgtgagcgactgttttagcgccagtcaggaggtgcgggttcttgtgccgctggttacctcagcggttcgggaagcgctgaattgcttgtagagtggatttggggccattcttccggagttaggttagtgagactctgtaatgtgaacccgtgggacttattgcccacatgcccctggggtgttctggcattcgaggaattctaagggagctggaggcatgcacctcattaaaggcgtttttacgtcgtgagcagttttatgttgctggctttttacttcagaagtatcttccctggttcccctgaagtaaaccgagaaacagccctgtcagtctgccaggaagcttcgaaatacgtcataactcgcttaaggaagggatatgttgagaaatgtgtagagtaggtaattaacttgttgatgaacctcacaccacacaaggaaaaacactacaatgtcctggtagatataatctgggaccgtggttttatgttctttttggcaaaagcttcttggttttgttttttggttttttgttgttgttgttgtttttcgagacagggtttctctgtgtagttttggagcctatcctggcactcgctctggagaccaggctggcttcgaactcacagagatccgcctgcctctgcctcccgagttctgggattaaaggtgtgtgccaccaacgcccggccaaaagcttctttacatgcatgactacttgtttatgaagtctttgctagacaattctggatgcatcacccaatttccctggggagatacagctgccacttagagaggtctcattatctccagtgccatccagtcaaagatcatggagggccaggcaatggtggcgtatgcctttaatcccagcactcaggaggcagaggcaggcggatctctgagttcaaggcctgcctggtctacatctcaagttcgaggccaaacagaactgttacacagaggaaaccctgtctcaaaaaccaaagatcacagagactacccttgtagttagacaaatcaggcttgtgatcacaagaaacaccaaagcatcactgtctgaaagaatgcagtctggacttctcaggtgattgaggggatttaagcaagcagatgctatcaagaggtgggagtaattgttggggttttaatgcttctgcataagagtcaagagaggattggtgaaaacccctcatagtacacggggaatatttagttatttttgtggttggccctaatattcttggttttatttctgtattcatacatgattacagggtttgttcgtctctctctcttttttagagatttatttatgtatacagtattctgcctgcatgtatgtcttcaggccagaagagggcaccagatctcattatagatggttgtgagctaccatgtggttgctgggaattgaactcaggacctcaggaaaagcagccagtgctcttaagcactgaaccacctctccagcccttgtcttttttttttttttttttaatctactgaaatcatagagtggtctgtctaagtttggcatggtagcacttaccgtcgtcgcacttgggagataaaggcaggaatgactctgcatgaccagcagagagagagagacagacagacagacagagacagaaacagagacagagagagacagaagaaaaagagaagaataagaaaaagatcttcttagtgtcttttacaaatcactttgctatgcactaaacttatcctaaaaataaactgaattgaaacagtgttctatgaaattatttaattcagcacaccctagatgataatatcagcattccccccccccactatccaaggctattctctttttcgttatgatccataatgctttgggctttaaaataactgaaataacccacaaatatttagtgccccctaagcatagcatgtccttgcctcagaagagctataatttagtgagagagatattttattagtttccttttttggatgaagaaactgcttggatagcataggaaaaattatccacacttatatatacagacaacaaaaaagagaacccaggacaatttgatactggtggctgctcatttaccttgaggatttgagttgctgctgccatagcatagtcttctttagctaccagcatctatgtgtgccaggatttcttaccagcaacactattagcactttggaccagacaactctgttataggttgatgttctcctcactgaggacattcagtgcctggtctatattcatagatcctagtagcacactccttccagtcatggcattgccaaatgccaaatgccacctcctgggaggtggggtaaacatcacccctgattgagagctactcacatcttgtctcttcctgggttgttgagctagaacaagtattcttggctagtcctcaacagagttgggaggccatgaagaagagagaagcaaactggactaagtttctgaaaagcctgttcattcaatgataaaaactgaaaggggaaacgaaaggaaagatgatagaaatggagaaaggtaatttacaggaagtcaccctttcatgatttagttcatgaaagttagttgatcctaaaaaatatactaaggtggttgtgctatccagtttaaggtcaacttgacccaagctagaatcatctgagaggaaggaacccaactgagtaaatactcctaagattaggctgctaggcaagcctgcagagattttcttaattagtgattgttgtgggagggcccaaaccattgtgggtgtcacccttgggctggtggtcctgggttctataagaaagcagattgagggctggagagatggctcagaggttaagagcactgactgctcttccagaggtcctgagttcaattcccagcaaccacatggtggctcacaaccatctgttatgagatctggtgccctcttctggtgtgcagatatacatggaagcagaatgttgtatacataataaataaaatcttaaaaaaaaaaaaaaagaaagaaagcagattgagcaagcccacatagagcaaagcagtaagcagcactcccctacggcctctgcatcagctcctacctcaaggttcccagcctgtttgagttcccatcctgacttcctcagtgatgaactatgatgtggaggtgtaaaacaaataagcccatttctcccctagtggctttggtcatgttttttcatcatagcaaccatagtactaagtatggcagcagtcttcatcaggccttcttgtccctccactccctatttgggagatattggtatacatagcaaatagtcaaatcactttgtgaaaaagattttcttttcagcatgatacccagtgtaactatcctcacatgtccacttgaaggaaatcttgcttcagagatttcatctttcttccaaggagtttgctttccaagaaaagccaggatcccctggtgaactagccaaagtcaccaagcaatgatacctaagcttttccagttttctaagagatagaacccatttggcatcaacacaaataatcattgtaattttatagcttgttttatttagcaatcactataaaacgtataaaacacagccgggcattggtggtgcacacctttaatcccagcactcgggatgcagaggcaggcagatctctgtgagttcgaggccagcctggtctccagagcgagtgccaggatggggtccaaaactacacagagaaaccctgtctcggaaaaaaaaaaaaaaaaaaaacaacatataaaacacttggtaattttcaattcatacctatgagggaaatcactatagattttctactttctaaatagagaagccaaattatggactctacaaaagtagtgagaagtcttgaagtagtctactgggctctttactctggaccactctttatgcctagtgtcaacccagttcttcagctactgaatggtaagttaatggtgatatttaatcaaccctatactaaagtatgtttttaatgcccttggaacagtccttatattattccagatcttggggtaccccccaaaccaccatggagtctgtactcatatgcaaaagcaaagagcctttgttcaagctcaaggttggactctctgtctgtccaatgtcgtggttgagagcagaaagtgcccagcccaggctgggtaaggtgtttatgatagtagaagttgagggtgaggtgattgggttcaaggccctgattggctgacaattgtctaggggtgtcttggtgaaaggggaataggtgtgtgctgggcttgagaacatttggtgatcttatctaatggttgggatgtttggatgctgaccctctcttgatggtgtcagcttatgccttttcctggaacctggtgctgcctgccagtaaactgaaactcatgcctacttttcagctcacttttattaagcatgccatgacagcaatgtgcccaagctcattgggctgttctgggctccacacttattctcttgagttgaccggtgtagtatagctattttctccaacctgaaacatgcccttgtagatgagtgagtgcaagaagctcataggacttgaggagttcaggaaaaatacaagtctctgatagcactacaaggtacaaagcccctcccacaaagttataaaagcaaggaatcatttctggggagaggaaacttactgtgactccaagctcttcagggagctccaaggatatagcttttgtgagtgcacacccatgttttggtagtcttttcagtgacacagctgcctatgagtcaactacattcttgtaaggaacgtcaatcaacttattggttcaacaaaccaataagtgtgtgatcatttctttgttctgtcattggagcccatttggattgaatagacattgttcatgtctctccaggaaaagttacccaacacactcacaaaaatagcaggtctgtagagactatgacttcaaattgtgacagtatttgaattagaaccaagatcttgggaagcttgctgggtgtggtggtttgaataagaatgatccctagcagggtagtggtggtacagcctttactcccagcagggtggtggtggtgcagcctttactcacagcagggtggtggtgtaagcctttactcacagcacttgggagtaagtagatcactgagggtgatctggcctacagagtgagttctaggacaaccagggctacagggaaaccttgtctcaaaaaagcaaacaaaacaacgaaaaagaatgccccccccataggctaataatagtcattagggagtggaattgtttggaaggattataaggattaggagatggtggcttttgtggagtagggtagcctttggaggaaatgtatcactggggatgggtttgaggtttcaaaagtccatgccaggcccagtctctctctccctctctctctctctctctctctctctctctctctctctgtgtgtgtgtgtgtgtgtgtgtgtgtgtatgtctgactctatgtctctctgtctttttctgtctgtctctctctttgtctctctctctgcctatggattagtctgtaactctcagctactgttcgagcaccttcctgcatgccaccatgctccccaccatgatgataatggactaaacctttgaaattgtaaacaagcccctaattaaatgctctctcttataatagttgtcttggtcatggtgtctcctgataacaacagaacagtgactaagtcattgggcaaactaatcacctgagttcaagcctggaactgactcctaagactagtcctctgacaaaaagtgcactatggcacatgggtgaccccccacaataatagtaaataataataaattaatttaaaacatggtttttagtctatcttttgcttagtaagtaaaaaggtttttggttttggttttggttttttggttgttgtttgtttttttttttctctgagacagggtttctctgtggctttggaggctgtcctggaactagctcttgtagaccaggctggtctcaaactcacagagatccacctgcctctgcctcccgagtgctgggactaaaggcatgcgtcaccaatgcccagcagtaagtaaaaagttaaatatcacccacacatcttagaaataatggcaaacataaggtagtgattctaccccacatagaaatctaggcctatttacctcattttcattgtgaatactgcattgtatggggactttaaaagttagtgttggtgagaaaagaggaaagtcactgaaacatgaatggaaaacatcttgtaactacaagattaaattaatctttgggttgatcttgacagaagaaaaagtgaggctcctcacaagaagccttggataaggttattttatttttattatctatctatctatctatctatctatctatctatctatctatctatctatcatctatccattcattcattctggtgttttgagacaggctttctctatgtagccctggatgacctataactgttctgtagaccaggctggctttgaacttggggattcacctgcctctgcttctggagtgctggaattaaaccatgtaccaccatgcctggcatgaatgggattaccctgagagaaacacatgaataggaattaattcttgttgcttactttggcttgtttgtttattgatacagggttttactatgtttcctaaaatagcctcaaacccatgatccttcagcttttaccttgaattatttttaaacatgtttacatttattcacttactgtgtgtgggggtgtgagtacatgccatacatatgtgcatagaggtcaaaggaaacttatttccaaggaggggataaaaatccattcttctattactctatcgcagcccttatcttatgatggtgtacctatctttgaggtcttggaggacaggatctgtgtactactcattttcctttgttttcccatagacagcacatatatgtgaatgaaaaactctaatgaggtgatagatatgaggactcataactaaatcaccaggactcttagattcttgaacacagactaatttctaagacgcagtggggagcttccagctgcgttctatttggaataattgagtgtgaatgtagtcaagaagaaagtgtgttttacatcctcccttcatgactcattggaaaagggactgataacattcgtaacagaccagtgggctctggaaggagtggttcagtttaccttgtacacactcggcaccttagattgtcactgttcatagctcacatagctcccttgcttttgattggcaacccccagactctacacactgcccagtatgtattaggaattcagtgagtggaactgaaagaatgttcaaattaataagtggaataaagaatttcactttctcttatcttaggtcatttaagcctaccctctcaaaatgattttaggcactagttccttttatagctctttccttatcaacccagcctaccacaatttcacccttttctgttatgatttaatattcatcaatattattggataggcattttaattctttttgcaattttttttaaagaggctctgtctgtgtagctctggctggcctagaacccactatgtagagtgggctggccttgaactcatggataatcctcccaagtactggaattataggcatgtaccacaatgcctaaccaatgcattattattttagactcatctgtctcttctttccaacaaggttataaaattctcttattttcttctttagttttttgaggtagagtttcatgtgtcaaaagtatgccccctgaagtgtcttaaatctagtaggattgcaatgttataaatagttggtagtatccagggctacttaaagttttgctatcttagcagatgatttttttgtttgtttgtttgtttgtttgtttttgaaacagggttcctctgtgtagctttggagcctgtcctggaactcactctgtagaccaggctggcctcggactcacagagatccacctgcctctgcctcctgaatgctgggattaaagatatgtgccaccccccccaccccaccctcttccatcttagcagatgatttgggttttttggggggggagttcgagacagggtttctctgtggctttggaggctgtcctggaactagctcttgtataccagtctagtctcgaactcacagagatctatctgcctgcctctacttcccaagtgctgggattaaaggcatgtgccaccaccgcccagccagcagatgattttttaataaaacacaataagattctcccttatagtcattagaatggtcactatgaaaatgaaactgaaagactcacacaccaaaaaatgacaagtgctagcgataatatggagaaactggaagccttgtacactgttgataggaaggcaaaatgccgagtctactatggaaaacagtaaggctattcctcaaaaaaaaaaaattaaatagaagtaccacagggttcagcaattctgcttgtttatatgtatccaagagaaccaaaagcagagtctacacccatgttcatagcaacactatttacaatagtcaaaagaatgaaacagacattccatcaccagacaaatagacaagcaacaatgtggtgtatgcttatagtggaatatcactgagctttcaaaaggaaggaaattgtgctgtatgtgacaacatggataaccttgaggacagtctgctaaaggacacaagccagttataaaaagacaaatactggggtgctggagagatggctcagcagttcaaagcatagactgcccttgcagaggacctgagttcgtttcccagcccccatgtcaggtggctcaggactatagataactccagctccatggcatctggtgctctgttctggacacacacacacacacacacacacacacacacacacacacacgcgcgcgcgcgcacacactaaatctttttaaatgattttttgaaattatattataattacataatttcccccttctatttcctccctccaaacctgcccatatgctaccatccccactctgctagctctcaaatttatggtttctttttctttaattgttacattattatgtgtgcatgtttcctaaatacataagtacagcttgctcattcagtataatgttatttgtatgtatatgttttcaaggctgaccatttggcattggataactaattggtatgctcttctctggagaagacctgttttcctgctttcagtatttcctagttgcctgtaattctttgtctaggattgagatttcaccacccacattagcttgtccattggtgccctccttattcaggtcatgtttaaacggtcatattggtgagacttcatggatgtaacttctgattagatatagatatagatatagatatagatatagatatagatatagatatataagagatacaatatcacaacaaattccctgttcctctggttcttacaatctttctcacttctcaatgatttctgaacttcaggtacaggagttgtgtggtagatatatcagttgagactggggctccacaaccctgcattttgatcagttggggttttctgtaatggtctctgcttgttgaaaaagggaagtttccttaaagaggggcgaggactacatttatctgtgggtataagtaatgcagttagggattatgcaggttcagtaaagtggttgtaggttcttcaagatccatgactcgatagtcctaggtagttggccaactttccagtaccaggcatgatttctttcttgttgagtgtgtcttaagtgaaaccagagggctgtagtttaactgccaaggcatgaatgccactatcgtacccttagacacagtgcccagagtcccccaagctggatatgacacgatagctttctcaaggactgactagctttcatgttaccaaaaggtaccatgcaagtttccaaaggagagaagcaaccaacagtcctacccagctatgacaactatgaaccataacaatgacgagcacagtgtgataacaataaatcttttaaaaggacaaatatcttcttgaaccttttatatgagttacccacagtaataaagttcatattggttgccagggcttgataggataggaacagtgctagttaagatacatagaatttcagtatgtaggatgaaaagagttctagaattttggataagaaaacttaactgtgcacttgaaaatggacaagatgatatagtatgggtattgtaaaacattaaaaaatcaaatttattttatcattgtattattgtatatccatgtatgatgtgtgtgaattgtgtaaattcaggcatggatgtgccagagcaggcatgtgacagaggacaattttcaggagttggctatctccttccatctttatgtgggttctggggattgaacttaggttattaggcttgtatggcaagtacctttacacactgagccatcttgctgacccttaacactctcaaaagggcacagaacaagaggctggaaagattgctcagtttttaagagcatttgcttctcctgcagaggaccagagttcagttcccagcacctacattaagtagcttacagttgcctgtaagtccagctcccagggatctgtgagtgtccagcacggacacaatgtgtgcatacacacagaggaatgaattatatatgtatatataaaattatatacatgttatacatataattttaaaaggacacataacaggatgtcaaaaaaccacagtttcagttcttggttattcccttctctttactcagtgtgcctgttgcttcacttaaaatcaggataatatgcctgacagttctggtttttataaagatcatataaaaacaaacaaaaacaactcttatggcaatgttttgattagtagtttttacagcattccagcatttctagtcttacactcaagacaagtttcgcgtcttatttcataatgcaatgttcctaagggtgcctcagccaaagtttatgaccacttcaaagaatatgcatgcccaaccccctcaatttgggctatacaccttataatttggctctaggacagcaaataaacagcttttatgaagaccattgatgatctaagatactaattatcaatgtggtttagcattaattgaggaaatataaatccaggattctcatgttaatgttcaaagagctagccccaaattaggaggctaagagaaagaattaacatctgttgaatggcagttaagtgtcaggccccagagcaggtatgctacctgtgctatttcctttagtagccactataatcttttcaggttggtaaaacagggaacataaagttgagagaggttgtcactaactcaacaatgaacaagaggcagagatggacttaggatttaggtccaaatgactgaagcctgcactctttctactatcttacactgcctctcaaaatatatttctctatccttagttacatagagttcatgataaatgatatgtatttgttacacatttatgtcaattatctgacttggtcaaacaagtaaactagactgtgggggttgattagcactgctttagaggtgaggacacaggcagtcaggcaagcagtaagcaatcagaactttccttctctgaatcagcctcctgggagcagaatttcatttctgtgtttcactctagttttttaataggcatgaagtctaagtgtcttgaaagccttgcactcttacggtgtgtgggcagaacaacacacaaactgcttcttgcttatactcccaaatcattaaaatagctgtgaatgaatatagttttttttaatatttagtttttagccatgtggtggtggtacagttacttataagatagtggtaataagagttggaacttgctatggagaccagactagcatcggacttacaaagatctactcacttttgcttcctgagtgctgatattaaaggtgtgggacactatgacagcccatttttaattttttttttttgagacagggtttctctgtggctttggaggctgtcctggaactcactctggagaccaggttggtctcaaactcacagagatccgcctgtctctgcctcccgagtgctgggattaaaggcgtgctccaccaacgcccggccatttttaagttttttaataatgagtatatgtgtgtctgagtgtaggtttgtccactctagtgcagtacctgaagaggccagaaaggcattggatcccctggatctggaggtgagggtggttgtgaactgcttggatgtgggagctgggaccagaactccggtcctctgaagagcagtacagcttctttactgctgagccatctctccagccccaagagttgtgtatttcttaacagtgatattggtcaccaggagacaatgaagcaagtattttcataattttgagaggaaaattgtatttttaacctagaactttgctcagccatatgatcagtcaagtctggggaataaagatcttttcaggcatgcaatgactttaaaaagtgtctcctccacatacatataacttttctttgggtactgctgaatgatgcatttcactaaaacaagataggaaggtaaagacctcagggaacaggatgaacctagggaagaatgaaaaagcaagtccctaagatgacatcctcacggggacagtacagtcagcctggaggatgaacacccctggggaagcattttgattgaaccctatggaatatctgtaatacttgactgtattgaaaatagcttaagcattttttttgcttaagcatttttacatttctctttcagagtctgaaagaattaatgattaataacattaaaaaatggcaaatcaaaaactggggtatttattctaagaacaacagagtaggaaatataatttgtaatgtgaataattcatgtaaaataagccacacttataaagtcataggctagaaatatcagcttaataaaaacattaaatattaatattgggaggctaaagggaaggaaatacaaaattgacttctctgttaggtcttatttaacatttgaaaatccataaattgcagtataagaaattttcttgagacagaatttcttgtattctaggctcacatcaaactttctatgtagctgaggatgaccttgaactcctggccctcctgcttccctttcccaaatgctagggttacagtcacgcatcaccacacctggtttatgtggcaatggggatcaaccctggggcttgctctgtgctagggaagcactttactaaaccacaatagtccctataactttaattcataggaaaatgaacagaagcaaggaagcatttcagaggacacttcaggctttgggagcccctcctctgccctcaacctccccccattccccaacctcatccctgctttaaaaaaatcattatgagcatgaacacggtagttgttctacaagcgctttgtatgttgataaacatttaacatatcaaagaaacaggagagagaatgaatgccttgagtatctttctagacctatgatatataatgtgatgatatgtatatgtatgaattatatatcatcacatttatatatacacatgtatgtcatcacatcacatatacctcagctatcagaaaataatacagtactaactagactgttttatttgaggcatcacaaataaaatttgtgtttggcttaccacaagcattgacatcccagagaaggtggtctggaaagtgccagtccctcctcagtctcttgactcatgttctaaaactgtgaactacatcaatgtcatagaggctctggaacctcaataggatgttatcttgaggtcagtgtcctaagactatcttctatgtggaattaagaaatttaggctcctttcttttacttactggccaggtgtctccagcctcccatttcttctatttatcacagacgtcattatatagtgaataatatccaaaatgaactgcctccgattaaatgcctctcagttgcaggtacgtcccagtgtacttattaggaatgattccatcttttattaaactataaaaactttaaaagcaccaactttgtttttctgaagtttcccacacactgtgactgctgtgctctacttttagtggctactacataagtgatgcttatttgttgattggtatcgtggcaaggatgtcattatatattcttgaaattccctttttagaaatgacgaaaattccttattctccaggaagatactattttgatagaaaatttataattaattaggacaatgaagaaagttttcttcctgagtggttccttaatgatttacagttctataaaaagttaagattttctttgtgagacaggtttcactatgtagatcagggtggccttgaaatcacagagaccctcctgcctctggctcttgtcttagttggagttactattgctgtgataaaaaaaaaaaaaaaaagaccaaaagcaacttgaggaggaaagggcttatttggcttatacttccaaatcatcatttattataggaagtcaggaactcaagcatagcgggagcctggaggcagaagctgatgcaaaggccacagagctgcttactactggtttgctcatcatggcttgctcagtctgcttcttatagaacccagagcttacagcctaggaggcagcaccacccacaattatcgctaggaaaatttccaacaaattgtgctgtgcttaaacactgttctgtggggggtgggtgggtgggtgaaacagtgtcagactcctgtggtttgaatcaacactagctacttagttgtattgaactgcactgccttcttgcttccatggattgtttctctgctggccatggtgtttacacacacacacacacacacacacacacacacacacacacannnnnnnnnnnnnnnnnnnnnnnnnnnnnnnnnnnnnnacacccacacacacacacacacacacacacacacacacacaaattcccgttcctgtagaggccagaggtgtggaatccctggagctggagttacagctgactgttgttagatttctgaggcagcataaaaacacagaaggcagaaaagagataagggtctgacttccaacagacagaattgtgcttattagcagacatagtgaggggcagactcactcccaagggaagtggaggggtctgctggggaaaaaagctggctgcaaccctttagaggggaggatgacgggctcaggaataaggaaagtgctgtgcctttcctgagtctctctttcctaaaattgtttgcccaaggtaagacaggctgttccaacagacattcccttcaaagacaacgaataaggatgggcaaagagtcttataggaaccctgttttaccaccaaggccctctatcagttgtgagccaccagacctgggtgctggaaaccgagctaggatcctctgccacagcagtacgtgctgttaactgcggagccatttctccaccctgtagtcatcaaaaataaaaactcttgtcctctaagccagttccttttataaatgttactgtcttagttaggcttactagtggctatgatgaataaaaacacattaactaaaagcaagttggggaggaaagggcttgtttggcttacacctccacatcatagtccatcactgaagaaaatcagggccagaactcaaacaaggcaggaactgatgcagagactatgaggagtgctgcttgctggcttgcttccccatggcctgcacagcctgcttcttatagaacccaggacctcaacaggaatggcaccacccataatgggctagggcctccctcatccatcactaattaagaaaatgccttacaaccagatgttataaaggcattttctcaactgaagatttctcctctcagatgactgtgtcaagctgatataaaactagccagcatagttactaagagcagagtaatattttaaagaaaatcttgttgctgtaggcacagagaattggattctagttttacattattttaaccctagataatcccttaggtaaatttacattttgaaacatctattaagaaagaaaaagaagccacctcaagtatgtttgtaaaaatagcataaggcatcagccatctacaagcagccagaaggttgggatgagggagctgggtcactcaagtccatttgccttcacattgtcagacagagaggcccttagtgttagggctttacaggagcctgagcatctttgggagctagagcaggaacaggaacaagagctcaagcctgggcctgggcctgggcctgggcctgagataaagctgcagcactggtcttgttttgggcctttgtcttgggctggcagagcctttcacttttggtattgcaggcgtaaacacaattcccagacttggggtgggcaatgaaaacaactccatggtgtagagtgaccaaccagcagtcaatagggtcaagatctctttattcggatacaccagcgcaggccaaagtgaggaggaaggagccgggaccagggccaaaagaagggatcatccacgtgtcggaggtcccttaagaagcttcctaaggtcaccttagacttcccctcaccacgccctcacgggtgtgttctggcacacctgtccgggctactaggaagcggagctacagtgtctccctacaccgtggagcttgtaatcatgccatttgtgatcttaggtttaacctcagactgtacaaggacctcagcatgggtgctcatggccttcacattgcttttctgaactctctcaggctccttgtgcagtacttggaaaaaaaatgatatttttctgaggaatacttggggttgaaccccttaagaaattaatatctttgtgatcagggtttcttgatgccatttctgtactgtacatttgcagaactggttgtatgtactttggttcttgaatttgaccatgtttacatggaacccacagcttttcctagagggaaagagctattttgaaacatctttacaaaatttttgaaaatagcatcaatgcccattaacagacttgtgaccaggtgtgtatatgtatttcaattgaccattaaaagatatcagcctgccaggttggtgtcatatgcctttaaacccagcacttgggaggcaaaggcaggtggatctctgtgagttcaaggccagcctggtctacaaagcgagtgtcagggctcccaaagctatatagtaagacctgttatgataaatctttctgccataagccgccgagccccactatcacatgtgcgctttatgccagccgcccgcccgagttaggcccaaatgaatacacagaaacttgtattaggttcaatgctgcttggccaatgactaggattcctcatctgttagctcagtcttaattatcataaatctatatattttataagacttatcttatcggacgtcttattggcatccctccttgctgggggatcacattgtggtgctggaggagcaaggggaaaaggggacccttcctgtttctccttctttaaatatgagtctccctgctatgtcacttcctgcctggatcaccacttctctactacatttcccagaatcttctttgactcctagtcccgtctaacttgttgtctcattggctaaaacagtattttatttaaccatcaataagataaacatacacagtacattccccatcatctcctcttttctgtctaaataaaagggtaacttgtctttgataataactgaagaaaactataaccataactatctgtcttcaactctatcaaagaccgtagaaggacaatatataaactctagaattgacaggacatctagctacctggacagtcatccaaagtccctctgtaacgttggggcatccatcttcagcctataggccacagtgtgtctagcacacttctccatttcaacaggaacccttcagtactgtcttgttttgtaaattcagcagttactttcttgtgggtcctgcatgtccagtttatacagcaacaaacggtccaggcaagagcagtttcttgcccaaatggctaatcttgccatgttgaaagcaaactccataacgagtttctttgatgcccatcctcctttctgacgtaattggtgtgccaggagcagctgtgtctcactggccaagaaaaagcaacaactatgtaaatgccatatttctgtaggtctttgaaaggtttgaagaatacctatctcaaatacatctctatatctagaaaacctaactaacctaattataagttctgactattatagtaaaagatctgtaaaaatacaatacttaaacaagaggagacatatacatatcacaaaattgaccttaaagttgtatcaataaatgaaaatctataccaatgtaaagtgttcattcctatatcctattccgcttttctttctttaaaaagagattgactatgctcattatcatttataacctactccatttaaatgaaaacaaacatttataaacaatatttggggatttgggcgtcattccctctaaactgcttcctgatgattgggggcgatgttcatataccatggggatcatgataaaacatagaaatctgaccaagtccttgttttcgtagtctgaaaggctgtatcgtctcagctttagggggtcttgcttgatcaaaccacattagtctggaaggaatcaacagcttttgattttctgtggaaatacaagcaaaacctttatttctaagtagcctgtcattagacttaaattttgaagtcaaagcattttgacttcaaatgtgtaagttggattaatttagcagcatttataatcaaatgtatggcatatagtatccagattctctgtgtattttccatctttatgtggctttttattactttatttttactttcttttgtttcttttttcctgagacagggtttctctatggaaatccgcctgcctctgcttccttctctcacaagcccatatatatttttaaacgcagtgtaaacctttagaggtttctttatctggatctgtctttatcatctcagaaatgctgagtctaaaccccagaagcgccgggatggcgcaagcatatggaagctgctccgatgcctctcagcagcccaacagtgccctgttgggctgtggcagcaggtttccctctttctctgggaaacttggggcgtggcagtcatcccactcctgacaccattctgttacgataaatctttctgccataagccgctgagccccactgccacatgtgtgctttacgccagccgcccgcccgagttaggcccaaatgaatacacagaaacttgtattaggttcaatgctgcttggccaatgactaggattcctcatctgttagctcagtcttaattatcataaatctatatattttataagacttatcttatcggacgtcttattggcatccctccttgctggtggatcacattgtgctgctggaggagcaaggggaaaaggggacccttcctgtttctcctcctttaaatatgagtctccttgttatgtcacttcctgcctggatcaccacttctctattacatttcccagaatcttctttgactcctagtcccgtctaacttgctgtctcattggctaaacagtattttatttaaccatcaataagataaacatacacagtacattccccatcaaagaccctatctccctaaatgagccctgattctgttaaaagcctagcaaaattaacaggaaacagaacacattaaattattattttttaatgctagccctctttaaattttattaaaagcagttcaatattcttagaaagtctaattgctctgaatataaagtattaaaaatattaacagcatttttattaaagtcactttaattacatataaataaatctttttgtctggtatatttctctgtaaacctcaaaaattatggatagcatttatagaggtgatcactatgtatttattaaaaacataagtgggtcctggtaggcacaggcctgtaatcccaactgcttgggtggttgaggtagcagggtcacaagttcaaggccttcctgctcatacagtgagttcaagtttagcttgagcaactcagtgagacttgtctccaaaagtttttttaagatgtattttatgtttatgcatatgtttgtgtgtctctgtgtgcatatcatatgtgcagtgcccatggaggccagaagagggtgttggattccctggaagtggagttacagatgtttgtgagccacccagcatgggtgttggaaaccaaactcaggtcctctgcaaaagcagttattgctgttaaccactgagccatctcactagcccctcaaaaagttttaaaagattatggtgctagggagatagctcaatcgaaaaagtgcttgcctgagttcaatgaccagagcctatatgtaaaaaggtgccagttgtggtggtgtgtgtttataacacaacactggagacaaggggacaggtgaatctctggggtctgtgggctacttaacaagctgcaggccagtaggaaacactatgtcaaaaagaaaaataggctggctcacacctttaatcccagtactggggaggccagcctggtctacatagagttccaggctaaacaaggctatgtagtaagaccctgtctcaaacaaaaaccagagtggatggtgcctgagaaatgctatctgaggttgacctctgcttccacacacgtatgtacatgtgcacctgcatgcacacatgtgaacattacctctcatacatgaagaggttttggaatctagtgtggtggtgcagcatttatatagtatgctgaaaaagaaagaagagaaaaataacaaaaaagaacactcatttgaaaaaccatacaaaataaagtctccaatattttcatcatgttgcatctgtcagtgacttagacatcattattccatgtagcatatcacaagaacactttttgttacaacacaaatgttgtgtctaatggcccaatgaacagagagatatagctcaaactttctttttgttagcaattctgggttcaccttgataatttcacaatgtacatacataccaatttaaaaactattcaatagtcttgcattacaaaatgtactatctcctggtaatgaattaatattgagggacaactttattatttcaagagttaaatcagtccatctcaacactgaaaaagaattgtaatttcacatggaacaaatcccagaaaccatgcaaaagtttctgtatttataagctactcctaaattcatttcttaaaattatattttatttgcttgataaaaaaattgggagcatctctgaatttttcttctcttttgaacaagccttgattttcatcatgcggcctcagattcttggctctctgactctgcgtgtgcctccaacacttccctgtgatttctgcttctcaagaaggaacatgctcaaccctgcacacacagcactattgcaagccctcccgactgcttctctgtttcagacagcctcacagggactttacaaaaccatccaagtctgcctgggcacacaccacatgcagattttcatgcttcccccacaaccttctttttataaaggtaaaactatcctcttgccaggggttcaagacacctagttttgctagaggttgaattgtaggaaaacctacaacagtatgtcgaacgtaggaccatcccaagtgcctctaagcactgtccctggaagacaaaatttctgaacttttaacaaaagagattttatttttattcgcatgtaaatatgtgtgagtgtgcaattgtggattcgaatgcagtacccccagatgccagtagagggtgtcagatcccctggagctggagttatgagccacttgctctggtcatgggacctgaactcccgtcttctgaaagagtggtatatgcttttaaccattgagccacctctccagccccatattttaataatttaatcaccctttaagtgcaagatcttggcaagctttcttttttataagactttatagcatagtcctttttctaatacacacagggtaagttcacctagatcctgaatgttacccattgtgcagaatgaatctcctataatttccaatatgaaaagaaaatttaggataaacatcatatctgacaaaatatctataattgtatatgtatcacagccttaattttaaaatttcatgtttatgaatatttgttgatatattattcccaggagacaaacacataggaataatctaataagaggtttttaatgtccattagaagtattttggttaatataaaacatgtcatatcatctcattttcttttaaatttgacaacttagaaataaaaattaacctctttctagaatttgtttttcaagaaaatgctaatcaaaataaatgtagccaatacagaattagtagctaataggctgtggatgatggttcatgctgtaattccaattaggaagtagaatttaagtctatcctcagatacacagagagtcaaagggtagcttagactatatgaggccctatctcagcacaagaaaaacagcaaattgtatgacttaacaaaacttttatcttataatcctgagtaatgctattttatataaacaaattgaactttcagtcaagcattttagcattgtccctttaaaacacttgttttaggggctggaaagatgacttagcagttaggagtgcttgctgctcagtcatgaggaccaacaagagtttagactggcaaatgcttctaactccagctctggggaatcttaacaccttcttctaggctactggtgtgcacctgcacacacacacacaaacacacacacacacacacacacacacacacacacacacacacacacaggaatctgtctgtctctacctcctaggcatgaagttataggtgtgtgctactgtgcctgagaatccaaactcaggtcttcattttttttttttttttttttttttttttttttttttttttttnnnnnnnnnnnnnnnnnnnnnnnnnnnnnnnnnnnnnnnnnnnnnnnnnnnnnnnnnnnnnnnnnnctcccgcctcccgagtgctggtgttagagttatgtgccaccaatgccctgcctcaggtcttcattcttgcataaggaagtattttactccctgaaccgtccccatagtctgtcttcacgctgtgtttcaagaaacatcaatagaccctagcttcccttttaatagatttcaaagaaattaagattaaatagacttataagtcagtatatagatttatcagtgtttaaacactcagttaagtctgaactatgtttatgactaattaagatcatcttattttattttaaatctttgttataagtcattttactccttgtaaatcttgtagcagttattttttttatcagcttcagtttttagaattaatatttgaaagcacggaatcaaaacaagcccagcaccagaccaggaacattcagccaggaaactcaaaattaatctttttatatctacattttggtctttccccagccatctgccatggtgggtggatgaaaggcccgagctaacttggggttagcttgttaaacaactgcaataaaacctcttgctgtgctgtttgcatcaaaaaaaaaaaaaatctacattttagttaggcctgaatgagacaaagtcctggaaccactagtttttctttctttttttttctgtcccaaattctatagttaatgcctacatttttttttaagctaaccaccttttcaaaggaagagaggaaaaacaaacagacatgaacagctcttctgcgttaatagagcctccaaatcatccctaacacacacacacacacacacacacacacacacacacacacacacacacacagaggagagagagagacagacagagagagagagagagagagagagagagagagagaatactttaaattagacatctaaataaatttaaaaatggcagaagtttcagtcattttttttctgggaaccctaagggtagatgcccattacacatgaaaacaactgcattgattcagagtactctcttagatacataccgtaagtttacaggttccctgagggagaggggtgcacactaagatagtatagataatatattacacaattaaaatagaagtctcctcaacactcttgtttctctgggttccaaatagttcaccagaaccccaatagctcagatgagcctcaaaagaccaacacattccaaccttccctgttatacagcaaacacctgaacagtttatttgctgaatttgctcaagcttccagattgacaatattacacatattgacctaaatggttcaacagagccgactcggctctaatgagcagcttccaaatcaaagaaagtcaaagctcaaggtgcaccgagcaaggagacttcagggcctgtagagtccaaatactcacgtctcgagtctccactgtaccagaggtagaaagtagctgctgccaactaaagtggaaaggtaagaaaaagcccctggaaaaaggtgattccagcagctgtgtggactgttgatttgctcttctccttccagggtagacctgctaagtggctgatacccaaaatgtgtctttttcttactggagtttttagaatcaaaaccgaggtcctggtagttccaacaagtgtgtttgaccctctgtcctcaaaacaccataataaaaagcagagaaatgagatctatttaatgtgacccctaagtcaggatgctaacatgatatttggcttaactagaggacaaggaatacagtcctggttagggtaatgtcctgcccatcattaacccagcaccctcttaggctctattctgtccggcaaggtggtctgatttgttagaattgtgtgaaatccttcccaggaagtcgggctcctcctctggctgatactaggatttcagcctttcttatccccttgcatgaggttcttggggaaatgccaattttgggggacgatccattgtttctcatagccaaagggaagggtgtaagtgtctctttagagtatctacattccttccagagctatgaatggctgtggccttcttgctgtcttttttcctaaattgtacttcagttccctttcaatggtatcatactcatgccagtttaaactattccaggtggaggcttctggcctttgcttttcttctgtgcatgcaatgacaccagtctcttctttatctcatgcttttcttctgtgcatgcaatgacatcaatctcctctttatctcatgcttttcttctgtgtgtgcagggatgcctcttctttgtctcatgcttctcaggttcctgatttcccaacattcagtatcactgttcttctagtagatattcttctaaacaaaaatgaaatttcagttgtttaattctttttgagtgttcttcccttttcctccatcaggttcccttttctcgtataccttcaataggacagcattttttctccaccaaatttccatcgaatatttatgattctgttatcatttgtggtaatgtcttcagcatcacagttttcctgtcctagttacagagcaaactcagggtctgactcacaaattgcgtagtttttattgcacatttttcactttaaagttatgtttcataatatttaaaagctcattaaaatttttttcctgctgggcgttggtgacacgtgcctttaatcccagcactcggtaggcagaggcaggcagatctctgtgagttcgaggccagcctggtctccagagcaagtgccaggataggctccaaagctacacagagaaaccctgtctcggaaaaaaaaaaaaatttttttttcctatgtgtagttgaaagttttctgaccctcctgtcagttcccccagctgcttatgaaataacactctgagccttaatatcaattgtttggccaatgtctcagacatattactggctagctctctcttataaattaacctatttctactaatctatgtattgccatgaggctgtagcgtactggtgatgctctggcatgttactctttggtggctacatggtatctctttgactccatcttcttttgctctataactctgtttggattttccacctagctatattatgcctggccattggtcaaaacagctttattcatcaaccaataaaagcaacacatattcacagcattcagaaggacatcctgtatcatctcctcttttctgtctaattaaaaatgaaagttttaattttaacatagtaaaattaaatataacaaaacttttcaagcaagaattacagctacaatatttagtctatttgtatttggcaaaattaaaggaaatactctatcatctatcctatctttgtgaatctaaagttttatatctaatttatcttttatcataactaaggaaaactgtaacaataacaatttgtcttcaactccatcaaagaccccagaaggatatattacctaggtaaacaggaagtgcattgcaagcagcttccaaaattttagaaatgacagagacatctggctgcctggacagtcacccaaatttcctctgcctgtcattctctctgaagtaattggtgatgccaggagcagatgtatctcactgtcaagaaaaatctaagttcttaaaatattttaaatgccatattctataggtcttcgaagtattacctattcatctgaaatatatctctgtatatctataaaatttaacatgactaagtttgactattatagatgactatctattaatatgtatttcttaactatacattacatttttaaatgggctacataaacataatacctgaaacaaaagcagaaatatatacagtataacaaaactggccttaaattttgtattaataaaccaaaatccataccaatatattcatttctgaatcacctgtgttatttttattttgtgtgtgtatatatgaagtttgcctgcaggtatgtatgtgtaccatgtgcattcggtgcctaaagaggccagaagagggcatcagatcccctggaactggagttacagacagctgtgagcctccgggtgggttctgggaactgacccctgatcctcttgtaagatcaggaagtgctcttaaccaatgagctatttatctggcccctagagagttaattttaatacagttttatcagtgtaaattttctgttatctgaattaagcatattcctccagaaaggtttgctatttgctcttaagaaatggcatcatatacggctaactttttagtttaatgtgttggggaggtggtagcattctttttggtgttttgttttgtttttgttttttttgtgttgtgttttgagacagggtttcactgtgtagtttggagaccaggctggccttgaactcacagagattcacctgcctctgccttccgaatgctgggattaaaggcatgcgccaccactgcctggcggtgtttttttgttttgttttccaagacagggtttctctgtgtatccctggatgtcctagaactcaatctgtagaccagctggcctcaaactcatagatctgcttacctctgagtctgaagtgctgggactaacggcgtgtgattgatgacacagccatagggagatgttgctttcctgtacagcaagagtatgagacatgtgtccttctcatatgtgtaccatggtagaaaaggtctagttcattctctgaccaaatgtccatgttcttcctgggcattcatccatttcctgcttcattttctgtccctgtattttcttgattattgtttgtttgcttttttaaaagaatatattttatttatactatgacagtttaaaacacccaaacatcaggtccttgattactgcataacctccacttcctcacccatccagtttcaggaccctgtacatttttcatccttggagagagaaagagaaagacagatagaagtaacctggacttctgctttcttacaagttcagtgtgcacttaaaatagtgctatggtattgcagtaaacgatgactgatgttctgtagcatgagggttttcagacaatctagatttacatgttgctggatacagcgtgacaaacatttctgtgctcatcaaactattcctttctcatctttccacagccctcccctggcctcccccaccccctgggagaaaatgtgggataaagatgtgagacgtctccagtcacacagacttcgatgggatctgaagagactgaacagtgtatcataacttttctcaataacattctgtttattctttgaggattttttattaacatttggttttgcttaattttacccacatcctttttctcagaaatgagcattatgggggttctaatggcttcttgaacatcaaatggctcctaaaagtaaccatgatggattgagtgtgaatgaagcaaacaagggtaaaattcctcttgaattacatatggatttaataattagcaagaaagctcttcataattagaaaaaactgtttaggggataatgttcaagatgcttgagaatgtgtactgtacagtcttgctggaatgccgatgccacagctagaagttaatactctcaaccaagagtgagatgcgtagtcagtttctggcacataagcaaggacagagttggggttttgttgttgcttttttaaattttgatttatttttatttaaaatatgtatatgtgtatttgtgtgtggtggtgggggtatgtacacacgagtgcaggtactcacataggcagaaggtggcactggatcccccagagctggagttacaggaaattgtgaatctcacaacatgagatcagcaacagtgtcacctacaaaaacagtgggcactcttaaccacagagccatctttcagcccagatttctctttctttttttcctctctcccccctccccgctttatgtatactggtgttttgcttgcatgtatgtaaatgtatgtctacatgccgtgcccttgtaggccagaagaggatgtctgatcctctggaattggagttacagattattgttagtctccatgtgggttttgggaactgaactcaggttctctggaaaagcatccagtactcttaactattgaaccatttcttcaaccccaggaatattttgtttttgtttttgttttttttttcccagacaggatttctctgtgtagccctggttgtcctggaactcactgtgtagaccaggctggcctcaaactcacagagattcacctacctctgcctcccaagttctggaattagaccctgagtgctgggattaaaggcatgccaccgtgatgccaggctcccttgtgttgtaagtctccattttgcaaactatttagttctgttgttttgcattgcatgtagcccaagctggcctccagcttgctatgtaactgatgacggccttcaactgctggtcctcttgtgttcatctcccatgtgttggattacgaggttgtgtcatttcaggtctttgttgttttgagaaccatatctagggcttctccattccaaggcaggcactttattatacatccccagcatcattttccaaatgtctaaacatccagagtttatttctatgaaagaaagttctttcatactttcttttgagagttgccactattgtaaagaagtcaatgtacaaagcaataaaaacaatagagtattctgggtgtaaaggacagaaagtcagtaaagatggctgtattcctcacgcattatggcactgaataagaagaaagcttcttgttcggtggagtttgatggacagacaggcagcccctgtaaagacttgaaagtgttgaagaggagagggtgccctgaggaatgggctgtacagccagagcctggggactgttgtgagctcctgggctttatcctgagatgtcagttcagcccctcagtgcttgttatatacagatatattgtaaataaccattaagtggatctgttcatgtgagtgtaggcctgagactggtggttgataatgtatacatctgtgaaatcgctaccgataccactcaatctccaggattttaccattaccttacatctttgcttatggctgtctaaggctacctcttgcacacttccgggaaaccagtacaattgtgtcttttctaaagattctattaaatggagccacacagtatgcggtttgtgtctgccttcttttgctcagcttgctgttgttgaagtttactcaggatgaaaggcttactcccttttatgctgagctttcattgggtttatataacagactatttatctccccacccactgaccggacatttgtgtgtgtctcgtccagattctggctgtgataacatgctatgaacatttgtgtgcaggcctgtgtcagcactcactgcaacatgtattgtagctaataagtctaggaagacaccacgcccatccccctagccagagtatatgtgttttggactgggagcagaggaggaagaacttgcctcagcactggaaaaacagagtctctcttcctcttgaaagaaaagcagctggtaaaaggagcagtcttgtgaggcaagaatggtgttcagaatccttttctgaagtgaggatttgtttgttctcttgggatactgaaatgctgccatgtaaacctggagctgccatgcctgtctaccctggttacatgaaggaaagttttggtggtggtgttttggttgtatgcatgccagggacagagagagagagagagagagagagagagagagagagagagagagagagagagagagagagagagagagagagagggagagggtggaatgcacgcagaacttggaatccaaagaagtcagtgagtaagagaggccccagggggaaggacatggcagagacagttcaactcttaagttctcaatgtcctagtttccacagggccagcctttccttaaacctgaggtgagacaaggtgctagcttgagatggttacagaggctcttcatctgtgaggaaagaaagacagaaaatggtttccctgacattttaaacaaatattttatttatttattatgcatacaacattctgcttccatgtatatctgcacaccagaagagggcaccagatctcataacggatggttgtgagccaccatatggtttctaggaattgaactcaggaccgctggaagagcagtcagtgctcttaacccctgaaccatctctctagccctttcctgacattttctcttctgcccatgcttagtttggcttgacagatgtgtatggacatgtgcccgttattgtgccttgcgatggaaccttaggctagggagatgccttccaacagaggaggtgaagctcgtgctgcctgggctgagggcagtggagactgagacttagaagataaagtgagaagcagatagagcacagtaggactcaagacacattcagtgttctagatggtatggagaaaggtggggacatgctggagatgccacttgcaaagcaggatcagttaggaaagtctctgaatgccaggttaagcttatgttgtagaccttgaaaacttaacaagtgttacaaagcaccagaggctaggtaggtggcttcaacaatagaaaggtttcttctcactagtgtgagaatttgatggcagatttggttgcttcagacgcctcctttgtgttctgtgtctccatgctgtcttccctctctgtttgttaatgtctgcatttcctttcttataaagacatcagtcagaatgaggtagcattcatccttctgacctctttttaacttaatttcttttaattgcccaatattgaataccgagtcattctaagatactgggggttggacatctgcatacaaattgggagcagcacaatttagcccacaacaggagcattaaatgattttaagaggggaaggacatgaacagattctactcttcttcttcctggtaaccatgtgaaggacagattgaaggaggacaagaccagacatctgaatgtttgttcaaggctttggggattgtccaggcaaggttgttacactacaaccaacatggaagatgctgtgacccgacaacatgtcgggaattcttgctacatgcttgtgtacaatcctgcagtagcagaatcagctacatgacctcatttagttgtgagacagtcaacctggagacagcacctcttgacacaggctgagggcacacttctaagtgtccccatcactcacacacttcagatgtcagttacaagtcctaggttgttttccttgtggctctgatgaatcagctacatatggaggttcccacaatcctctgcttgggtttgattgctgagtgccaggagcccacagaacttagaaggacacttaaattcaccactttattatagaggacatgacaatggatgtagattaagaaatatatgcatgaagatgtgggcagagcttccatgctgtctctaggcttgtcatcaagataccacatgttgcactatccaaaagtactcttgaccagtccttctgactttatatggagacttactgcataggcatggttgtgaatacacagaacaaggagacctagcaaggcctgtataaccacgttctccttgccctctctaaaacattcctttttcctggatacttttaggatgaggagggtctgatgacctattgtcatgcaaggtaggttagagaatttaattatgatgaattgaaggcaggaaagtgggggaaattaaagttgctgtagccctccacagggaagaaaactctagtgtctaaaacctccccagagaacggagtttataagtgaggaaccatgagcaaaaactaaaataaaaatgatgtcactgagatcttgaaagcctaatcctgatgctgcctgattagaaaataactcactcaagtgtaaactgcttctgagcagctgctgacttccaaaagatgcttctggatattctctcagagaaagggagaaagatactgtggggcagaagaggtctaggaagggttgaactgcattaccactttcccaaagccttctaggttctcagtgtagaaaataatttgttatttgttacagttctacgttcactctgatttttgtaatgcagaactatttttggtgtagcataatgaacagatcatatggagatgggcttcttgaagtgtactgggtggcaattaatagatggatggtttgggtaattttattttttgaacctcatcttccttatgtgtaactaaggattaaaatagtaacagcacttgccttccaagtgtgttggaagaataaaatgagatagagaatgagatttatattttgttgtttttgattgttttgttgtttgaaatgaaatttcttttagcccagactggcttgagtctctccatgtaggctactgatcttcctgcctcttcctcccaaatgttgggattacaagtgggtttcaccccagccagtttatgtggtgttagggattgaacccagggcttcatgtatgctaggaaagaactctactaactgacccttatccccagctaataatactaatttattgttttgttttgtttgtctgttcaaagacagggtttatctgtgtagccctggctagtctgtgtagaccagactagattatctgcttgcctctgccccctgagtgctgggattaaaggcttgcactaccactgacaggcaataaagcattttaaagagttgtatagctaatacttattgcacttggcacccttgaaaactgcatttatgtccttaggtaagaataggaggcagataatttttacagaacaaactattgagtggtgcctgcggccgctggctgtgaactctcatgtacctctttcttctggtcccagatcacagagcattgttggttcttatttgtatcaacacatgagaaaacaggactcttctctgggctgtttgaatcaaattaccaggaaaggaaaaagaaaacaatgaagcttgatttcagtaaatgctgaaatctggggagcatgtgtaatatcacacagacaaaaggaagggatcgagtagacaaaagcagaggaaaagatggagagaaagccagagtggtcatatgaaagcagaagaccagatcagaaaaacagaggctttcccgaaatgtcttatttcacatgtagtattcctgcctgattttcttaagtgcaagaaccccgggggagaagggagaagctgtcctttgtaacatcatttgagttttatgcctggttatcatcaactcattattaataatattgttgtttgcaagaagtgactctaagaagttttgacaggttcatcatcatttataatatttttgtgaatgctgtagctcacttgggtctatcagatgcaggaatacaatgcaatgacctttaaactaaaacctgaaggctgagtaaggcttagtcctggcaagaatgggcaaagaatagtccaggctgaggaacgagttcaactgtggatttcaaggcaactactttttagtaggcaacattcagtacaagagatacttctctctcaagtcctcaaagttcacactgatagctgctaagtgtcttggctcaggacagggctgaaactattgtcaacagttgggccagtgttacccaggaggccaggccctccccagccctggtatgagaacagactctggggacgtgaactgaactgtaggagccagtgtagctgaagtgtgtttagttgcccttagagatggatacttcaatgtaattgtctagatcttcttgacataccgccattgtttttcactgtgcaagttttgggggtgatttggtaacctgtcattttactgccccacccccaccccttctgtgatttctcctgctgctgccatcctcatctccaaggacattttccaggccagaagtgtcagggtcactcttccaccatttgtcaggagcaatagatctaccctggcgctgtggctttggtgattgattctctcggccactgactcccctgttctgttctctggctcaggcctcaccagctcaatctgtccctcagctcctgtcacatttcattctttgatgtccatcccaattcttccatccctaagcgccaaatgtatttctctgtaaaggaattcccataaagctggctcatcttagatctcaggaagcagcatcagcctttgttcttgttctgtcttctcctctcaccagccactcactctctcgccatcttgattctacttgtttccagtgcttaaggtgttcctcaattcactcattcatctatttaataaatatgaatcaaatgtctcttatatgttggacaatgaggctctgaagatacacagtgagaagggacccagtctctgcccttgtggagcctacatgttcacaaaatttgccagaattttaaccaaaggactatatcaaaccaatggaagacagggagatttctccaacaccagattagataaatttctaagcctgatagctggtgttcccaatcagattgttaaaccaatagacaaggtattcatcataggtctggagaaagtagtgggaaatgaggttggtgacatttagaactcttatggagtcttgaatgccaggattacaagttttgttttgtttttcattttttcctgactccaagcaacctttatttatcagaatacaaataatatatcacacaacattttccactttttgtctaaataaaagcctattagtttatgccacaggcaggcccttgtaacatccttactgactcttctaaaacgactcttcaaagtacctaagaagcaaagattccatatttttctgttcatcttgacacattcatagaattattttggcaaatatatcaggactaggaaaccaagctctatttaattgtcctaacttagatcagttatttcccagacagaaatcaggtatgactgggaaagtaagatcattttagcctaagaagacaggcaatagaagaaagggtggaactctatcacctattcctactttaggatcctactttgtttaaaactgcctggctgcacatctcaagagaacaggaacactgttgtccctgaacttgacagcagggctgtgcttcatctctctcacagctcacatctgggaatccccattggaaatctctttgtgctgcccaccttcttcccagccacatctgctgtggagggcagatgtggatgaagtcaagtttctaagcaagtggggcaggcccagaaacaacacttcaaagtacaggctgcatcctttctcctcatgccctggagtctacagacttaagctctgtcctctctggaagctggtgccggtttcctcccatccagaaaagctgtgactcttcaaagggatgtggaagttcttgctgactgacagccatctgaggagaggcggcctgtcttgaaggcaggccaaacatctgttgatgctctctgcctcctccaggataactgggctactgacagctcccgccttggtcctggggtaaatcagagagacattagaggacaaagaaggcccttaagaaggcccagcagaaagttgatatttctgtgtttctaagccttctgccatgttttccttccccagccttgctgaagtctgagtctttggaactgtggggaacagggtaattcgacttttctattaaacctcttccaaatgtgtgcaggagtcaggtatttgctctttatccttttttaaaaaattaggttgatttattttatgcatatgagagttttgcttgcctacctgtatgtatatgtatcactttgtatctggtggctttgcagtctttttttttttttttttttttttggactggtttagttatttgttgtgtatacagtgttctgcctgcatgtcagaagagggcaccaaatctcaatacagatggttgtgagccaccatgtggttgctgggaattgaactcagacctctggaaaagcagtcagtgctcttaacctctgatcatctctccagccctgcctttggcagttttaagaaggcattgtacctctggggcctggagttacagatgatagtaaaacaccatggagttgctcaaacttattctggaccctctgcaagaagtactcctaactatctctccagatccttgctgttattcttttgtttaaaaagaagaaaagagaaatattgagacagacatgagacttaagactataagtttattataaggcgcaacagaatggataaactaagaagaggaacagggtaatggctgaccgccatggccggtcgccatagagagagagagcggggaaacagagagacgggaaagcacatagagagacagggagagagagaaagagagagagagaaagaggagtaaaggggcaagagcctatcttttaaaggggtcctctgcacctgcgtacagacttctttcccatggaaccttgggctgaccagggtattgcctgagtggattccaccaggtaacaggggcaggccagcataatgcctgaacctttcattcccacctctacttattattaaaaaaaggtggggtgtttnnnnnnnnnnnnnnnnnnnnnnnnnnnnnnnnnnnnnnnnnnnnnnnnnnnnnnnnnnnnnnnnnnnnnnnnnnnnnnnnnnnnnnnnnnnnnnnnnnnnnnnnnnnnnnnnnnnnnnnnnnnnnnnnnnnnnnnnnnnnnnnnnnnnnnnnnnnnnnnnnnnnnnnnnnnnnnnnnnnnnnnnnnnnnnnnnnnnnnnnnnnnnnnnnnnnnnnnnnnnnnnnnnnnnnnnnnnnnnnnnnnnnnnnnnnnnnnnnnnnnnnnnnnnnnnnnnnnnnnnnnnnnnnnnnnnnnnnnnnnnnnnnnnnnnnnnnnnnnnnnnnnnnnnnnnnnnnnnnnnnnnnnnnnnnnnnnnnnnnnnnnnnnnnnnnnnnnnnnnnnnnnnnnnnnnnnnnnnnnnnnnnnnnnnnnnnnnnnnnnnnnnnnnnnnnnnnnnnnnnnnnnnnnnnnnnnnnnnnnnnnnnnnnnnnnnnnnnnnnnnnnnnnnnnnnnnnnnnnnnnnnnnnnnnnnnnnnnnnnnnnnnnnnnnnnnnnnnnnnnnnnnnnnnnnnnnnnnnnnnnnnnnnnnnnnnnnnnnnnnnnnnnnnnnnnnnnnnnnnnnnnnnnnnnnnnnnnnnnnnnnnnnnnnnnnnnnnnnnnnnnnnnnnnnnnnnnnnnnnnnnnnnnnnnnnnnnnnnnnnnnnnnnnnnnnnnnnnnnnnnnnnnnnnnnnnnnnnnnnnnnnnnnnnnnnnnnnnnnnnnnnnnnnnnnnnnnnnnnnnnnnnnnnnnnnnnnnnnnnnnnnnnnnnnnnnnnnnnnnnnnnnnnnnnnnnnnnnnnnnnnnnnnnnnnnnnnnnnnnnnnnnnnnnnnnnnnnnnnnnnnnnnnnnnnnnnnnnnnnnnnnnnnnnnnnnnnnnnnnnnnnnnnnnnnnnnnnnnnnnnnnnnnnnnnnnnnnnnnnnnnnnnnnnnnnnnnnnnnnnnnnnnnnnnnnnnnnnnnnnnnnnnnnnnnnnnnnnnnnnnnnnnnnnnnnnnnnnnnnnnnnnnnnnnnnnnnnnnnnnnnnnnnnnnnnnnnnnnnnnnnnnnnnnnnnnnnnnnnnnnnnnnnnnnnnnnnnnnnnnnnnnnnnnnnnnnnnnnnnnnnnnnnnnnnnnnnnnnnnnnnnnnnnnnnnnnnnnnnnnnnnnnnnnnnnnnnnnnnnnnnnnnnnnnnnnnnnnnnnnnnnnnnnnnnnnnnnnnnnnnnnnnnnnnnnnnnnnnnnnnnnnnnnnnnnnnnnnnnnnnnnnnnnnnnnnnnnnnnnnnnnnnnnnnnnnnnnnnnnnnnnnnnnnnnnnnnnnnnnnnnnnnnnnnnnnnnnnnnnnnnnnnnnnnnnnnnnnnnnnnnnnnnnnnnnnnnnnnnnnnnnnnnnnnnnnnnnnnnnnnnnnnnnnnnnnnnnnnnnnnnnnnnnnnnnnnnnnnnnnnnnnnnnnnnnnnnnnnnnnnnnnnnnnnnnnnnnnnnnnnnnnnnnnnnnnnnnnnnnnnnnnnnnnnnnnnnnnnnnnnnnnnnnnnnnnnnnnnnnnnnnnnnnnnnnnnnnnnnnnnnnnnnnnnnnnnnnnnnnnnnnnnnnnnnnnnnnnnnnnnnnnnnnnnnnnnnnnnnnnnnnnnnnnnnnnnnnnnnnnnnnnnnnnnnnnnnnnnnnnnnnnnnnnnnnnnnnnnnnnnnnnnnnnnnnnnnnnnnnnnnnnnnnnnnnnnnnnnnnnnnnnnnnnnnnnnnnnnnnnnnnnnnnnnnnnnnnnnnnnnnnnnnnnnnnnnnnnnnnnnnnnnnnnnnnnnnnnnnnnnnnnnnnnnnnnnnnnnnnnnnnnnnnnnnnnnnnnnnnnnnnnnnnnnnnnnnnnnnnnnnnnnnnnnnnnnnnnnnnnnnnnnnnnnnnnnnnnnnnnnnnnnnnnnnnnnnnnnnnnnnnnnnnnnnnnnnnnnnnnnnnnnnnnnnnnnnnnnnnnnnnnnnnnnnnnnnnnnnnnnnnnnnnnnnnnnnnnnnnnnnnnnnnnnnnnnnnnnnnnnnnnnnnnnnnnnnnnnnnnnnnnnnnnnnnnnnnnnnnnnnnnnnnnnnnnnnnnnnnnnnnnnnnnnnnnnnnnnnnnnnnnnnnnnnnnnnnnnnnnnnnnnnnnnnnnnnnnnnnnnnnnnnnnnnnnnnnnnnnnnnnnnnnnnnnnnnnnnnnnnnnnnnnnnnnnnnnnnnnnnnnnnnnnnnnnnnnnnnnnnnnnnnnnnnnnnnnnnnnnnnnnnnnnnnnnnnnnnnnnnnnnnnnnnnnnnnnnnnnnnnnnnnnnnnnnnnnnnnnnnnnnnnnnnnnnnnnnnnnnnnnnnnnnnnnnnnnnnnnnnnnnnnnnnnnnnnnnnnnnnnnnnnnnnnnnnnnnnnnnnnnnnnnnnnnnnnnnnnnnnnnnnnnnnnnnnnnnnnnnnnnnnnnnnnnnnnnnnnnnnnnnnnnnnnnnnnnnnnnnnnnnnnnnnnnnnnnnnnnnnnnnnnnnnnnnnnnnnnnnnnnnnnnnnnnnnnnnnnnnnnnnnnnnnnnnnnnnnnnnnnnnnnnnnnnnnnnnnnnnnnnnnnnnnnnnnnnnnnnnnnnnnnnnnnnnnnnnnnnnnnnnnnnnnnnnnnnnnnnnnnnnnnnnnnnnnnnnnnnnnnnnnnnnnnnnnnnnnnnnnnnnnnnnnnnnnnnnnnnnnnnnnnnnnnnnnnnnnnnnnnnnnnnnnnnnnnnnnnnnnnnnnnnnnnnnnnnnnnnnnnnnnnnnnnnnnnnnnnnnnnnnnnnnnnnnnnnnnnnnnnnnnnnnnnnnnnnnnnnnnnnnnnnnnnnnnnnnngacccaggcccccccgccgggcgccgcgccccggggctggggccgatcggggagagggcacccccgcccccacgcccccccgatggggaaccttcgtcccaaggtcagccacctgggcgctgagggaggaatcaagtctgttgtaccagacaccagaccttgagaatatgctgatctggaatggctctgtgcctcatttgaaccatccaatagaatccctgttcctcgcttgtgtttttttctataaaaaggcacctctcccttggctcggggcgcttggcctcacagaagctaagtcgcccgggtacccgtatctccaataaagcctcttgcggttttgcatccaagattgtggtctcgttggttcctgagtacgggggtctcctcctacgaaagtacctctttgggggtctttcactggaactggctcttgtagaccaggctggttgtgaactcacagaaaagtgtctctgaatggacatttgtttgaaagacttattcatcatggtcaaagaacagcttacattttcacaccctcatcattaaatctaaagctctaaattaaggaattatacatttgtaaatggaaggtatctttggtaaattgccaaaaatatgggctttggagtaatgttttaattgcaaataacttttcagaagtacaagaaaatccttcccgaaagcttctgtgggaaagaacatgactaatccttatgtctggagccaatctcaacgccctttgcccctacagccctgaatactccagaagcacagccagtgttgccgctgctgtctgtctacggcctccattccttttcctgcactactgacagaaactgggaaaacacttgctatacttggtctataaaactgtggctgctgctgttacccaagcttctggaaggttgggactgactttcttctctactgtgcctactatacagctcaatgtatgttttccactgaatgaaaatttcaaggtcaattattcttatttaataacagcctaaacacccgttgtgttgtgacacactcatataaccagactgaagaaaccctatttattttcagaaacaaaaaaattctcattatcaagtattgcttgggctgaaacatggctttgacttgattccctttttaactctttgactttcctgaggcaaatttattaaatcctaccaacagtattcactaatggacctcagttttgtggggttagtgcttctcatttgtgggttttgtgaatatataataattacctcttgtataaatgaatatcagatatgctccaattccacagagaaaagagctctcttgatcattgtctgaagagacaatcactgagactacgtatactgtccacagataggaacatattttaccttttgttcacagggtatcatggtctgtatggagagcccagagtccatccactgccagtagagttgtgggactcacccatctgaagggaaaaggcaaagtctagggttttataaaataacatagttaatgtttaatactaactgcattagtagccatggattttcattagtttgtgtcaaagttaattgaattataaataataaattttaatattttattaacttaaaagtaaaaacaaagtgccaccttataaagttggagacctactcttggtgggagggagaaccacacatagagttatattatggccagcagactcatgacatgtattgcgtgcactcaaagatgatccataatgctaagatttctttttttgttttttcagcaaaataaaattccggtttattgttggacattgtttcacacatacatcaaacaggacaaaaaaataaaacagcaacttcataaaaaaaaaaggaagaaaaaaaagaaaccctttatctttggcctttttaaccatctcatacaaaccaactacttatagtacagctaggtacatatacaaaaaaagttactggaatgctcggaataagattggtttttgttgtttttgtttttttacaagtttttttttctcctttgagattataatgaacatggtcacaccacaaataaggtcagaagtaggacagaaaacgctctgaaggctggtttggtcacccgttatcattaaaaatggctgaccctctaacaatatgtacaaaaatataaaatgtaaataaaaaatacaaacaaattttccttttaaagtatttttaagaaaaaaagcagggccttggaagttttggttctttttccctcccctgttgcaaattcatggtgtggttttggtggggtggtggagagcgcatgtcatctgtgggtggcactgcccgctaagggcggggcctgctcctctactcgaaggtgaccacgtttaaattctgagaccggaagtggagggtgactaggtcacggtggccttaagtttagcttttcctttctgctgtctagtcatcctcatcggccttctgcttcttggtgtcaacatcctcatcatcttcagctacccgcttgcccgtaggagcctcagcttcctcatcttcatctccatcctcttcctcactgtcaccttcctcctcctcctcctccccaccttctttctcttcttcatctacctcattgtcagcctcctgctccgcattttcctcattagcattcccattggcaggcgcgtctcttccattctctgcctcctccacaacttccttcttctccttcaagtcctggaggactctggcgagagagctgccagagtctgccccggaggaggggggggagggggctgcagcgcagccagtggagcatgctaaaatttctttattcagataaacaaagccctgacacagtagtagctcgaggctactaggaggccgggctacagtgtctccctacagacaagttaaaggttatcgtgagcatacccagttttacctcataaaagtgttgaagatgtgtgtccttttgaaaaatgtgtgtgtgtgtgtgtgtgtgcacgtgagcgctcgcaacttgtttatacatgatcagctttctgaattaagattttttttcccaaaaatagggtttctctgtgtaacagtcctggaagttacattgtagagcaggctggccttgaactctcagaaatccacctacctctgcctcccaagtgcctcccaagtgctgagattaaaggcgtgctccaccgccccaccacccccgcctgaattaagattttctggttctttttttttaaatatatatattttatttttattttgtgtgcattggtgttttgcctgcatgtatgtctatgtgaagttgtcagatcttagagttacagatagttgagctgccatgtgggtgctgggaattgaacctcggtcttctggaagagcagttagtgctcttaaccactgtaccatgtttccagccctaaggggttttttttggttttgtttttgttttttattacatatacagtattctgcctgcatgtatgcctgcatgccagaagagggcaccagatctcatcacagatggctgtggtcaccacgtggttgctgggagttgagctcttcttctggaagagcagctaatggtgctcttaactgctgagccatttctccagccccttcagatttaaaaacttcagatttccatctgtcctgatggttctggagagatgggtcatcagagaaaggtaattgtagctaactctgatgagtgcgatcccagtgtctcacatggtggaagcagagaactgactcgcacaagttgtcctcagacttccacacatgtgcacatacatataaataaaagtaatgaaaattattttaaagtgaaggaaccagcttcccttttggcagccataacagccgaacacgtgcttgccataaacctgccttggtcacttagaggtcagatgcctgtctcgtgacaaggaacccatcagaagttagtcactagaaagtcagatgcctgtctcgtgacaaggaaccaatcggaagttagctggtggcgctatgctttacgaccctgggtgtgctttaaggacaagcgcacagcaatgaggtagagagcatagcaaccaccctgggagggcctatgggccataacaaccagttgaccaatcaacacagggcaagccctccaagcctggaagcacaccaatcgtgagcctgtgcgtaagcctgtgcgtacccctagacactccccttacgctgccctataagatcttccgggagcccctaggagccctctttgctagccatccaccatggtgggtggatcaaagacccaagctaacgtggggttagctcgttaaactacaataaagcctcatgcaatttgcatcaagctttcgcctccattctgtgattggggtggccgaggtcctgggctaagattctggaagcctcagctttctgagggtcttacaaaagtacatatttttacccctaaatgagaatcctaggtcaaaaaaatatgaaaattcaggttgcctgaggaatgaaaataataaagttttattggaaatcatttgaaaaatctggtgtatttacagcttgttcaatatagctcaaaggcagacttggaaaatgttaattgaaatattttcctagcttgtagagcatattcttgcatattctttaaggggtaatttggttgaaacagatctcattgtcttgctttagccgttcttgagtcagttttgtttttccctggagttcttttgtttccaaatctttcacaaatcaattggggtcaattatcttctatgcaataattcagatagtttgcatgcagctggttctccttaatcttaagcatttttcagagtcgttttgcctcctaaccaaagttctctacttctgtgaactatataggattcttgacagaattttacagggtatacagggttcttgagtctgaagtgtttaaggacagctgctttgctgggcattgatggcacatgcctttaatacagcactctgagaggcagaggcaggcagatctctgtgagttcaagaccaacctggtctacagagcaagtgccaggataggctccaaaactacacagagaaaccctggctcgaaaaaaaaaaaaaaaaaagaaagaaagaaaaaaagaaagaaagaacagctgctttacattgtttagaggtaggaagctggtctcctatctctttgtgctctattatcatacatatacaattctaataaacatgaattgcttattgtttatacagatgtgggaagtgagccacaaatgtcaataaacgaaaggcacgcactcatgtgtgtatgtgcgtgtgtggtgtgtgtggtgtgcttttacatgtgtgtgaaggtgtgtgcctgtaaatgctcatgtgaagccagaagtcaatattgcatagctttctcttcactttccaccttattttttgataccagttctcttactgaacttggagcttgccatattgactacactggctggccagtgagccctcaggaatccatctgcctccacctttccccaagctaggttattatagatgttggcttccacacctggttcaagacctgcttgggctttgtgagactttttcttgaaaaaaaaagacaggtgctagagagatgtctcagagggttaagaatactgaccactcttccagaaagcccagcttgatgcccagcacctaatcagcagctacagggatctgagcccttctggcatcctcaggcaccaggtacacaagaggtgtacagacattcatgcaggcaaaacacccatatacataaaataaaaatagaatataaaccgaagaaaggttgaaatttgtgctttagaggatatataaaatgtcaagacagaccacagaatgagaacaaatagttacaaattttgtatcttctaaaggtctagtatttagaatacccagattagcataaaggcaaatatcccaatttgaacagatgcaaaaattctccacatcatacccacaataaaatccagtgttatactcattaggactaaaataatctttaaaggactgtagcaagtattgacaaagatgtggagaagtaggagccattataagtgaaggaaacactggcaaaagaaaggaaaaagtagctaaacagaaagtcatggttggaggtgtctgcaccttcctcttggaaatggaaagattggagagtcacagaatcagccagaaagttgtaaatagcaatgtaaaacgaatggacctgactgcatttattgagttctccaccccagactgaaaaatgcacattgttgcctaatatatctggattattcattaatatgtttgaccataaaaaactcaatatatttaaaatattggaataatacagtgtaccatttcatagcctaaaaattgttctaatgtctttactgtaatataagttaattaaataatgaaaattatctgactctccaaatattttgaaattaaacaaatgtgctagtttagggctaaaaatgatctataaccttgagtttttagcattcccctaaacctaaacatactcgtgaacctatcagagaactttgtttactgagaaaagaaaatctttaacttttaaccttataacagattacagagtttggctacactaaataaaaggggccatttcctggcaacctctagagatataacttgagagcctccaacttaattgtaactctcccttgaggaagaagcccacacctgtcctattggatctaatatattcaccttcatttcagatttggctcgccttgaaacccatttcttcgatgaaactgtgaattgcagttttgcttgggtggaagtctctaaaagaactcggggagctgccagtgtggtacagagatgtgttcctgtgactggtgacagtttgacagtctccctccagcatcagagaggcagcacaccatggggctctgtagaccacccagtgcacagccaggcgtcatcgtaagaatggggccaatggtttgagactgagctactctgaggatctgaaaccaaagaataatcacaagtcagggcggatggggacacttgcccacagtgtctgggtggaagacagccacaagaagcagttgttgtgttggggggtgtgctgtatgcagaccactgagaggtttgggcagcaaggggctcaggctgtagacaacatggtggtcagtgaccccgacctttgtggtgaggaatagtcccataaactgtggattacagtggaaaatgacagctctaagatcatagcagggataactcaattccacatctgtttcccttctataatgtggtttactgtggggctggagctgagagagctaagactaccacgcagagcacttggcttcatgagttctgcactgcagaattcagtgcttttatcccaccatctgatacataataggaacaccctttggcctagatttttgctgctcctttatacataaactaaaggattctggagtaaacaggaatattcctgactataaagctcattggggacagcagcaatgaccagtaaacaaataaaatataggtgctggagagatggtcaatagttaagagcaatgaatactctttcagaggacccaagttcaatttccagtacccatatggcagcctacaactttccagggggtctgacaccctcacactggcatacattcagacaaaataccaatgagagaaataaaaataaataaatctaaatgaaatcagtccagatgcttgactgatccagtccctgacccacatatggtactaacttctacaatggaaatacaaaggaagatcagaagttcaaggttgtctttttttgtttgttttttttgagacagggtttctccgtgtagctttggaggctgtcctggaactcacactgtagaccaggctggccttgaactcacacagatccatctgcctctgcctcccgagtgctgggactaaaggtgtgtgccaccctaggttcaattcccaacaccagcatgatggcctacaaccatgtgaagactccagttcctaaagatccaatagagtctgccagcctctcttagaaattgtgtgtgtgtgtgtgtgaatgaaacaagcttcattacaaaagatagcttaaaataagagaggaaggggtgtgctggctagttttatgtctacttgacacaagacaaagtcatttaggaagaggaactctcagttgggaaagtaagattggtctgtaggcaagactgtaatgttttcttaattagtaattcatgtaggagggcctagcccattatggttggtcctgggtactataagaaggcaactacaaggaacaaggtagtaagcagcacccctctgagacctctgcttcagttcctgtcttcaagctcctgccctgacttccctcaatgagggactgtgatgtggaactgcaatctgaagtaattcctttccaccttatgctgcttttggtcattgtgctgtatcacaggaaaaagagaccctagctaagacaagaggacaggcctgtgacctaacaacccccccccacacacacacagtgaaagcttcccaaagaagcaaaagatgtgtggaagtttgaatggaattggccctcataatctcataggaagtggcactattagaaggtgtggttttgttggaatgggtgtggccttgttggaggaagggctttgagggggcaggctttgaggtttcatatactcaggaaactgcctagtgtcaacttcctgttgcctacaagatgtagcagtcttagctccagcactgcctctttctgcatgccactatgctaattgactgaatctctgaaactgtaagcaacccacctcaattaaatgttttctttgtaagagttgccatggtcatggtgtctcttcacagcaatagagaccctaactaagacaagatgtcagaagtcaggttagtggcagtccttgggacaacaagaacctagaagtagggaaaagagggcctatcagtactggtaatttccattttctgtttctaggcctaggctttgtttttctggttggttcacagtgaaaattcatcaagctgaacactttttctgtgtgttttctcaattaaaaagaaatgttacttacaagaaaatacaagctgggcatggtagcacacacctttaagttagctgtcccatcctgtaaggtctgaatccgtttgtccttcctcaactgaggcagagtctttctgctcttttcttaactacaagagagtccctgctggtagaagaggctagtctgttttgccagcagatgtggagtcaatgatggaagcctgggcaggccatgttatccttaaaagtaatgagacatggagaacagtaacctttgatacaggaaatttaggggtatctttgagtacattagagactttctcagttcttagtgagcttagcctggaggtctagggtccctgaaaactcaacagccattcaagccaccctgagctagtagcttttgagtttttgtccagagaatttgaagaatgagattcataaactgtagcgtatacattttagagaagagtttcttatagattacaaggagggaggaaaggagagggagagagagagagagaacccatgtagcaagagtactaagtggaggcttttctgtcccaccccgtcctgcagctgcttttaaaataatcactcagaggcttaatattaattacaaactgtttggcctattgctcaggcttgttgctaactagcttttaaaacttaaattaacccatttctattaatatatatcatgcatctatatataataggcaatacttgttctctagtatatcttggtgctcaggcagctgctggcatctccctgaccctgcccttctccctgtatctctgctttgatttcttgcctggctgtatatcctgctttgctataggccaaagtagcttctttattaagcaatggtaataaaccatattcatatcatacagaggggtcccagaaatagagtatcactaagcttctagtccaggtttgtttttttgttttttacttttctcttttcttttttttttaagtcttaagagtaaaacatagggagggggataagctggtaggcccagttggtctagtcagatgtccagttgcctgctctcagttttggtcacatcctcatgtattatagctcccaggcaaggacaagagataacaacggactaggaactggaactgtcttttgatattccaggtctccagcagggacatttgtagagctgattcgttggggtctgtattagttacttttttgttgctgttgttgtgcagtaaaacactctaataaaagcatcctaaagaagaaagcttatttaggcttgatgtccacaatggtagggaagccatgctggtaggagcaggatgctaagaaatcacatcaacagcacacaggaagcaaagaaagcaagaacaggaagtgggtcaagacaataaacccttaaagcctacctccaatgacctatttccttcaacaaggttccaccttctaaaggttacataatttccccaaacagtggcagcaactgagagaccaagtgtgattccaactatgactgggtcctttccctaagtgactggtttctaactcctatttccccgacctaggatccaaggcttaaaaaagtcatagggttgagcaaagtcttgcccaggtccctaattatagtaatgccaagggtggagagagcattttaatgtatttaatatttgaattggcttgacatagataccaagccagttgtcattgcagatgctgctctagaaacaaatggcaagaagagctgctataggacataaggaaacaattttaaataacgatttttccccctctgaaagcccgcctactgactgttgttttgaatgagtcctgacggccctggagagcagaataagcatgggaatcagtctacagaactatttcagaataagggagaagccacacccttcaccctctcacaccctcagcaagatccaaatgattaattagaacatttcatatttaggactttccccccaaactgacacttcctaaaaatacccataaaggagaggaataaattctataagaacaactttgtgtgtggggggcaggtgaagattgagcagctggatccccagcaggcaatttcaaagccctgacacagaatgagtgtcaccacactgtaaagaatagcagcctattaaaaccaattgtctccatttggctgcctgttttcttatttctgactctgcaagggctctaaaacaataatgtcccatgtttgggttcctgaacacacaaaattctgctttggaaagcctcaacctgaaagaagctgaaaccaaatacttccacctgcaatttacttccgagttaagagtcagtctcttttcttcatctgcctgaccggatattggaggaaccaaatcaaagggctataatgatccccatttccacctaattgcctttgcatgggctgtcctgctacagactgtgtccaaagcaaagccaccagcgctactgccctcatgatggagtccccatgtcttcagaggatgacacacagacactctgtaccttcagtgtggggctcactctttccccttatttcacagagcagttggaggctggttggatttctgatgtcaggcttccaggtgtgggtggctcccttcccgcctgggtttgctcttctgatggtccgtgttgttggctttgcaacatggctgatccctccataagggaccttctcctttccccatgtatctcagtagggctctgcattctgccacggggtagggttcaatccttcatccttctattttctggtgctgttttggctacctgcctgcaagatgtgctccatggccagctgtctttacaatgatttaagtgcttacatattttgggaacatttgtgcccaaataacacccagaaagtgtgattctggaattctaataaacagaatgcaccagggcaaaccatctaaaaccaaaactgggggaaagttttctacaggagaagcaaagaggcaaaactaaattaagatgacaaaaaagagggagaataaacctgaagaagtaagcaactcatgcattgcttcatcatatctattccacagcataaaactgttgagacgagactgtggaagaagtttcttctcttcccactgggtggggctcaactatcattatacaggacccggtcctttccttttaggtgcttttgtattcagtaacagataattccagatgtaaagaaaggatccaaaatcaagatgtagggtttttttgtttttgttttgttttgagacagggtttctctgtggctttggaggctgtccttgtagaccaggcttgtcttatagaccaggctggtctggaactcacagagatccacctgcttctgcctcccaagtgctgggattaaaggcctgtgccacttacacttgctttcttgttgttcttggtttggttttattgttgtttttttgaaatatggtctcatgtaaacctagactgctctttaaattgctgtgtttggtgaggatgatcttgaattcccaatgatgcacttgcttccatctcccaagtgctcagtttacagacaagtgttccagcttaaaaaaaaaaatgttgaagagttatgaatagtcagaagggattggacaaacacctcaacagtctctgtttccctgtgtgtttagctggtaaacaggcaagactctggctttgctcacagtctaaggactaaaattttgaaactcaccaattcatatgagaaaattgaaaatcccagatggttaggactgaaagtgagctcccttcttggctgagcttcctgctcccagtgtcactgattcctggtcctgcctcaacttatagtcagaagcaaccactggcaagaagcccctgtcagtgcagccacagctaagctgcctttcctcaggtttctcttccagggagggggagctcaggtgtgggctgaagggcagccaagtgagctgcagcctaggaagatctggttttcctcatcctagccccacagcaagttaaccccaggagagctgcgatggctgcagaagagttttgttagctgtctaatgcctgaatgttacctgccgggacggtaaagctgccaggcactgatatgctcagatgcaatgagatcctcaactgtttaagatagtttgagccgcaatcgtttcctagaacaatttcaaaacaggtggaggccctaccactgcaagtaagctcttggaaagttgtatattagagtgcactagcagacatcatttacctgtttaataaagttgtatattagattgcactagcagacatcatttacctgtttaataatgttgcttatgcaaacaaagcactatttggcccagatgtttttacccagaagagaaggaagcaatgctctccacatatcctttgatgagatgaaaaacaactttgttatgataaatctttccgccaaaagccgcccaagttctactgccacgtgggtggtctccaccagccaccggagttcccagcgtggatggacaaaataatacacagacttctattaggtacaaatgttgcctggccaatgactaggattctcatctgttagctcagtcttaattatcataaatctatatattttataagacttatcggacaccttccattggcctccttgctggtggatcacattgcactgctggaggaggcaaaggggaaaaggagatacttcctgtttctccttgcttaaatatgagtctccttgctatgtcacctcctgcctggatcaccacttctcaactacatttcccagaatcctctttgactcctagtcctgcctaacttgctgtctcattggccaaccagtattttattcaataatcaataagataaacatacacagtagtacattccccatcacaacttgtttgctctctgaattgaacaaaagaggaggaggaggaggagaagaaaaaaatacaaaatcaaactcaacatctggatggaatttagtatgtaccttctgggatccccggctcctgaatgtttcggctaaagactccctcttccgaggctgcagaggctcaagcctggtgggaaatggtactttgatgccagttcctgcaagttggtttaaataggttgtcgggatgctgtagccccaaccaaaccctgctgagggggaggggagcaaatgccttgcaggcatgcttacttgtgtctgggtggacacctagcaaggaggtgatttgtcacttgtgtctccagacctggaagtgctcttgtatgttgtatggtaacaaaggaagattctagctgggaagaggaaaatcccacaattataatatgagcccgagggaggagtgccatgatttccttgtccccctctcttgcagccaatctcactgaaagaaagtcagcattgtaaccctagttatagtgaaagcattaatcccgtttaagtttgtctcacttcacatatcagagcaatgatcacattcaaacacacacaaatagtattagtgtcatgctttgaaatggtaaggtctacccagctacatgctgggaaaggaaggaaggtattacatctataaagcataaaagtgtacgttatttttagccttgtcaaaaacagtcctgccaacctagccaccttctggaaattgctgtctagtttagttattacaatgctttactttaaactgagttatctgtatggtattacaatacaataccttcaactgcgttatctgtaaagaaaaaggtgtattttagcttatgggactggaaaagtgaaagtatgaagaaagcttcagtgagggtgttgtgccagaaaacttctaggagaagtgagcctgtgtgcaggagcatggtgaaatgggacagtaccagtctcatcttatgatagagaggtcgctcaaccctgtagttccagctatttaggaagctgtggcagggcttgtaacttgagtgggatgatttcactattctcatgagaactacagtaatgccttcttgcaggagaatccaacactattatgttacactattaggaaatcacaacatgaaatttgatgcaggcaaactgtattcggatcatagcaggagtttatctagaatttgttcctgttgcagcagctgataagaatgaactatagctgggtggtggtggcacacgcctttaatccagcactcggcagagcctggcaggtctctgaatttgaggctagcctggtctataaagtaaagcccaggacagccagggttgttatacagagaaatcccatctcagaaaaacaaaacaaacaaacaaaaaaccatgatattgtaggattaaacttattctaaaaaccagcccttgggtttagtgggtagttcttaaagctgagatataacattgggagataaataaagattggctccagcttttctaaattgcctgcaagagttgaagcttctagaactaggcccatgtttttgttgaacagaattaaagaacctgtttggaaccaaaggacatcaggagtttgccccctttctgatcatattatatagcagagcaagtcagtggaggtaggaagcacacaggtcttgtcttgatcttgggatattatggtaactccaatcttgcaactttggggagacttgagacaaagtcccacatacaagtcacatactctagcgggaataccctaattggctttcttttgcaaggataaacatcatgactggaagcaacttggggagaaaagggtttatttcatcttacagcttacagtccatcatgaaggaagtcagggtaggaactcaaaggcaggaaccaggaggcaggaactggagcagaagccatggaggagtgctgcttactggcttgttcccatgacttgcttaatttgctttcttataaaactcagggtagcactgtccagcagagtgagttggatcctgtcacaaatatgattgatcaagaaaatgccttataggcttacctacaggccaatctgatggaggaatttcctccattgctgttccttcttctaaagtaaccctagcttgtagtaagttgactattcagcacaaggaatagtctcttaattagatactttattttccttcttaaaacatgtatgagaaagtgaaggaaccctgtgtttgttgttttctctttttctttttgacccaaaacatttcgtacttcccctgtgtccttgtttgatttctgctgctactctaataaaatatcctgagggtcatagttactgttctattgctgtgaagggacaccatgaccaaggcaactctgataaaataaaacttttaattgtaggattgcttacaattttaggattagattgttatctctgagatgctgagaccccggcctttctgagagttactcttgtgtcactatgacagaataccagacataaattaaagggaagaattctttactttgactcatggtttcaaaggattccgtttgaagtacttatctccactgttctgacctcatggaaacagaacatttatgagccacaggattatgcagtaactattcagccatcattttataaggtcaacccatcagaatgaaagattctgttggaggattaaaccaagatgtaagctgtgttggagttaattgccttttgaatgaactggctttcttgctgtagtttgtttccatctgttacaaattttggatttatttccacagtttattactatttgatcatttattgggcacattttcccctatgcatttgaggtatattgataacaccccctagttatgtgtgaaaacagtcacacagtcaaaaaaaacctgcttcccacaaccaggtctttgttcctttctccaatgtaaacgcagagatctgccttcctgcaaatatcttcattggcaggcgtttggtcagtgctaagtgtccaggcaaagtatttcaaggacatagaattactacatgcctaaaagtattgattcatagtcacttagatagaaataagcatgccttggttttacctcgattgcaggtaagagaagtgatagcctaaactaacctcacactaactccttgcacttaccttcatctcgatttattaacccaagattttagcttggagatttattgcttgtgttaaccctgagaaaatagtgagtttgctcatcttcagaggagaagtaaactatctacagacctgctgaacatctgcacctccacagtcagagtggctgggaggtgccaggttccgtttcttgtgcaagttaagcttaaatcctctctttgttctataaccttaagcaatagatttttagccacacttaaagaatgtagataagcacacaatttctcccatttagactcccttgttgacttaatccctggaggagccttcattaatcactcttacccggtgccataaatgatagctgacagttattctctgtgtgtgactcttatctgccttggtgaccctgagaaactcaagcctcacattgcattgccagaagaattactgttgtaagtgtatttataccagtaccctcactgtagaagattttttttttttgtagaacaatgaagagatggatagacagaacatgttgtgagcagattcttgtccttagccctcagatcttagttccttcacttattgtaatgtctcctttggaccctgaaagggtttttaaggctggcccttataagccaccaatagaacagcatggtagcagaagcgcagaaagtcagggaaagaaggtgctggcagcaggcacaattatcaaaggacccagtgactcccttcttccaactaggccccactaacttaaacactggaacttccaaagtaataccactgggctagggaccaaacattcaactcgtgaacctgtgtgggactttcctgcttaaagctgacattttcaaaaccaaacacagtattcattcacctcataggagtcaagagagagtttatcagaaacagaatatgagtgactatggcctgggaacacaggtttatatcaccccaccccacccccaaacacatatgttacaataaggtaacaatttcatgaaggttttatagtaacaaaacagagaaagttataaatgaagacagtttttaaagacattggtgggaacagcaggcaggtgtgttacagcagagcaccatctcctgcgctgtcagcctcagatggtgtctgaggacattcttagcttttgagttggtggactctgagcacctgtttgtacagttcaaaaggatttacccaatagtgacacagatgttaggtcacacacagaggtgggcaatacacagctaagatgtttggctctggactcgggacattccagtcactccacaatcacagaagttctagtcagccaatcagctgttgttgtagaatgttcaatgtaaatgtgactccaggaacttaggttcatagttcccttgtcattcaagcattatgttttgtgcatgtgggggctagatattatttcatgtctcaacattgctaggatggctcattggtcggatctgataaagatgaggcagagtgggcaggaaatcagtctttagaacaaaaacatcgcctggtcttctgtttgagcacgaggacatggatctgttcccacaaacgctaccttttgcttggagccagtgtagcagatggatgggtgtaggtgggtgaggcagaaaggcctctgtagacctggcgtactgtgccttactccaaccaatgtgcctaaagactatctttgcttccttgtcagtaaagacgggaactcgctagttctaacataagcactggcatttaaagtccccaggcagagaggctcaatggataaaagtgctttctatgcctgagttttattctacacagtagaaaagcaagtaagggactgattgcatattatttctggggtttgtcagtttattaaataagaaaggcattgtgtgtggcaggggtggggcggcatctgaccaggaagacgtaggggagcgtgatgtttcagagaacagtcagtctcatcctttcagcctttattgtttgaaccttccactagtcggggcctcaggagagtccagctggcccaagggtgtaataggaatctaaggacagggaacccgtggggtaggaggcctgcactgttcgtaaatacaggcatgccaggatcttcactccaaagagtgtgtcccctggctggccctcctttcttatatttttcaggctctgtgatctttactgtaaagcaaaccatatggtttcgatatgggctcctggcttactgaaagcttttcatgtctccagcaccaggatgctctttagcccctttaaacaaccacttgggcatctaagatctctcaccagctgggtgtaagagcccactggacagcactatgtggggtacagaaaggggggtaagaaattatccatgtggggagatacatctgggattcacagaggtgagcacctggctcagtcacctgcgagtgtcaaaatagggggcaggctttttccctctccatgctccagctagatgtccatctgattcctagtgtgacatggccctttcctgaagagagcagagcccagaccttcttgaagaaattagggaaggaggtattatcttaataaaggaccatacaaagatccaaccccataaattggctctccagtcaccaagatcagattaagggatcaggtacttgttggacgaccaatgagattcattcaaagaaaactgtgattggagcagtgagaaggtgaaggatcagccatttcccagaaggggtcaaagctactaagggcaccacgaagggatgatggaaagataaggaaaacacccaagcaatctctatgtagttgcaggtttccattgtcagtcagttgttcttattcagggccagtgtccctgttcacccctctgcaaggaagcctttcttagcatattcccatatagctggacccttgcctccaagattccgtccttctctgtatcatgcaatctcccttccttcctagaactcgtagttgttgaaattaccttgtttagttgttttggtctcatgctctaaccatagtgtaagtgctaggaaagtgtcccatcaatgctgccggctcagggtctaaaatgtcacccacggctcagggtctaaaatgtcacccacggagcagcaggttgaggaacatgctcaacagggaggggtgtgagcagagggtgaggagggagagctgacactagaaagccagatgaaactgggatgggattcatatggccagaaggactataaatgataaggagaacaaccacattttgcctgatgtcttccagttttgatcatagccaacagggctgaacactgaacttccggtgtgcccagtgttatgctaagaactacagctaaaaagacagatgaagtcacaggcttagataatgaggcaaaagtaaactggagactagctctttcctgagtttttaatccctacactgaattgatcatctaatggggaggagacacatataaaaagctcagctacatgaaataggaaaggaaacatgagagatgtcaacgagcttcaaggggaacatattgagggaactataagagaaagtttttgtttgtttgggggtttttgaatccaggctggccttgaacttgccatacagctggctttgatcatccttcctctatttcctaagtactggaattgcaggtgtgtaccactatgcttggctggatgaaatttcattttggatgcaaagatgagtgacgagttcattgggcagagacaggaagtgtatttcagatgaagtgaccacatgagaaggggcatggaaacctcagaatacttgctacatccagagaacaacaagcagccattccagaaaagaaagaaaaaaaaagaaaagaaatcagcaggacttttgtttctaaaaatcatcccagggtgttagaactggaaactgtttttgactaagggaaagaagggctcttaaggttaaaggaatgcagtgaagaaagaatttcccgtgctgggctatgagatggtgctggagaaaggtgtgtccttgtgaggctaagtcccagggcagcagccctttcacagacctctggggtcacatggcattgaatggggtgcctgtgtactcggaaaggccagtgaaggcattgctgttgggagcctccaccccaggcctcatggctcagacagacctagagaagagtcttggtgtaaccactgggaatggagcactaaggacagcaggcactgactcagactgtctccctaaataattaaaagcttctgaaagggggccaagatttttttctatccattgttcatgaagagccaagagcagttagaaaactaagaaaatggggcatttgttgacggtgtttaacaccagccttcactcttacctttaaatcagtgtgtgctggcccaaagatgcctccagccttattcaagtctgcctcttaaattggagccttgacacattccagggtgtgtgcatatggatgtgcagtcttccgtgtgagtaagcctcacccaggcctcagattccagttcctccggcaacaacccagtgaggactgagacaagggtgaactcagaccatgagctcacttgaagagaaagggaaagaaactggcagaactgacatagaatcggggtccccacactctgctgtgaaacttatccacaagactgcactgcccccaggtggccacagcactcttcatgcctgacttactgtgccagtcttccaggtggatctcttcccagactcaggggagggaagaaaagagccaaaaccttgtatattcctttctgggcctgtgctgtgttatccactgtttgtctccctcccaccgcactctctatctatctaccttcttcccttcctccctaggagtcagttttctcctttcaccatgtggtgaaaggttgtcagccttagcagcaagcacctccactaattaaaccatctcactacctgttaacagttttcctatccatcttcttaggtgtgtgtgtgttatacacatgatatgcaggtgtgtcttcacatgagtatgggtgtgtatggagtctagagctaagttttgggtaccttcctctattactacccaccatattttttgaggcatagtctctcattgaacctggagttgtcatttatgccaaacaagctcccagaatttgcctgtctcctgcccatcctacagtgctgtggttatagacattcatgggctgctgcacttgacttgatatgtaggtgctggaaatacaaactcaggtccttatgctgccccagcaagcacttagccctctgagcaagagtgggagtgtgtgtatacactcttggttaagagcatggctggcctatgtctacgggttaggaagactgttggagggggctggagagatgactcatcacttaagggtactggctgctctttcagaggaccccagttcaattccaagcacccacatggcagtttacaactgtctgtaactccaattccaggggctcttataccctcacagacatacatgcatgcaaaactccagtgcacattaaataaataaataagaaaaagaaggaaggaagaaggaagaagaagaagaagaagaagaagaagaagaagaagaagaagaagaagaagaagaagaagaagaagaagaagaagaggtttgttggagtagtgacagtgctgacaggagctctccaggggcctcatctcctgttctgcctgactttacacgccctgaagacagcagctcagtatcccccacttaggacactttcagacacaaaaatgatacagcaagagtccctgctcccccctcagttctggggtctagtgggagacactggccaccctggccttatgaacatctgtgggacatggcaggacggagagatgggtgcttctaggtgactgccattcatgcggtagagtcctcactttctctaaattcctgggctcatctaatctgcaatttttcagtctcactgtactttatcgtactctgcttattcacacgctttctgggattcctcatgcgagttctccaggctttgccccacacttagaggaaacaggtagatgaccatgaagcagaggttatgagtgccagagggagaaggtgatgtgggaaaatcttggctctggtcctcattgatcgaatgaccaaatgtaagttattggtttttaaaaaacacacataaaacaaacaaaaaaccccaccttttctgaggggctgaggagatggctcagttggtaagattcttgccaagcaagggggacatgagtgactgtgatccacagtacccacatcagacaggcagtgcctggaatcccagtactgaggagcagagacagggtcatgcctggggctctgtggccagccagaaaaaaaaaggggggggtgacaagtgttaaaggaagtcacccagtgtggatctctaacctacatagacatatgcagattacccagagcaaagctccctgagtttccattttctcatctggaaaatgtcccatagggttgttataggagaacatactcagaaagttcaaataagtggcaggtttcatagcatcattgttataataggttcatcctctacaattgcttgtcctacttatcttttaaaaaaatgtcccaccattaaaagattcttattaggttcaatattcaaaagccctgtccactgtaatctctttagggagaaatattattcctatccattattactcactgtcatgatcctgaatcagttcaggtcaaacaggacaggaattggtcacaagcactaatattgtgtgggcaggaatgaggaaaagaaatgtttactaaacctggtataaggacttcagtcatatctccatcatcatcgtcgtcattgtcatcatcatcaccatcaatttggtttgtgtggatgtgaatgtggacatgatcagagaacaactttgggagttggttctcatttaccaccgtagtgtctctttgtgtttcacactccaggctagttcgttcaagaggttctggctgattacagatgtgtgccaccacatctggctttctgttgttgcatttgtttgtgtgtagaagtggtggtgtatgtgttctcgagggggctatggtgcacacgcagaggtcagagagcagtttatgggagttgtttctctccttccaccatgtggttctggggatggagctcaggttgtcaggcttgagcaagcacctttactcactgagacatcttgctgacccctcccctccaaatccaactttctgagtgggttctggggtcaaattcaggttgccaggcttatgtggcatgcccatttacctgctgagctgtctccccagtcccatattactaatttttaataatatattattgtttttgctgtgctaagggttgaacttagggtctcattcatgctagtcaagcactccaccactgggatatgtccctgcctcacctaatacatattattgtttactggatattttaaaaacttaaggacattcaagtacaaagggaaatgtacgttatctatctgtgtcattttttcataatcagaacataattccagagggaaaaaaacagttgttaaattctaaataattactgataccggaagtaaacattttctgatttaaaatgaagtaaatgttggcatctggtaatagtgcatcaaacctgaaagtgatgttttctagatgtaatccaagctggagagcaaactggagaggcaccttgctttctcatgaggatataattatttggaacaccttctgtatctttttattttttaattttatgtgcattagtgttttgccatgggtgttgggtcccctgaaactggagttacagacagttgtgaactgccatgtgggtgctgggaattgcacctggatcctctagaagagcaatcaagtggccataactgctgaaccatctctccagcccccaccttctgtatcttatacatctcatacatgacctgcacttttgcaaacaaaagatgggtgtattagaataaatcaggccagggagctgggcatagtggcacacacctttaatactagcacttggtaggcagaggcaggtagatctctgtgagtttgaggtcagcctagattactagtgagtttcaggacaaccagagatacatagtgagacctttgaaaaaacaagacaaaaaacaaaagaaagaaaaatgaggtctgaggaatgggcctgaggcttggaggctatcctcacctgtttagcaatctagtataagacttgcatttttgcagtacctttgatgaacaggctagattggcacatacaacacgtgttcaataaatagctggagactggcttcatgaattaactagcattagactaactcaatccaattcttggtctctgggaagccaagaagaagatacattttctgaatatgctctctcaactaccgtctacaccagtaacagactcagcctaaagtctaagcaggttaccaacatgccacaggccagcatatcagaatgggttctatgcgccaaaccatacaaataacagttctttctcctctttcaaacttgggtatatgactttcataactgcatttagttttggaatggtgttaccccactaagcaataagataatttccaagtaacctttcctctttaaaaatgtgttttatcattacatttgtttatttatgtatgtgtcgggggcatatattcagaagataacttgtgggagttggttctgtcctcccttatatgggctcagaaaccaaactcaggtcatcagcttgtggcaaatgcctgatcttgctgagccatgtcagcaaatctataacttgccctcttttttttttaaaaaaataacctctttttttttctttttaagattttatttatttattatatatacaacattctgcttccatgtatatctgcacaccagaagagggcaccagatcttataacagatggttgtaagccaccatgtggttgctgggaattgaactcaggacctctggaagagcagtcagtgctcttaacctctgagacatctctccagccccctataacttgccctcttaagcgtcatttagagaaagtggagtgctctatgagtgtgtcttacactgaaataaaccacactactgatccagtcctcatggttgcttgccaagcacctcatccactgagtcatctcaccagtccctttatttattttgtgggatggagggtggggcatgccttgctacagtctgcatgtagaggtcagaaggcaacttgtgggaaatgggtctcatcttctatcttgtggggctgggaattgaactagatccaccaacttagcagcaaatacctttactcagagtcatctcccaaagtccccctccattgtttttcttcttcttcttcttcttcttcttcttcttcttcttcttgcgacctctagctactgggttttctgggtggattttggggccagttggaactcagcacaagtttccttagtgtaaattctctttttatttgttttggggtttgttgcgggagttttgttgttattgttttgctttgtttttttgttattttaagacatgacctcactatgtagaccaggctggcctcagacttgtgccaattctcctgtctctacctcccaggttatagcattataagcatatgcaaccacaaccagcctggtgtgagttcttttgcctatgaaaacttagttgttacacttccaattaggaaacttcctcaaattacggtgcagatcactaattgtggagaccagaggcatttggtgccattgaacttcaggcagtatgtgggtctctgttaagtccagtctgcttgtgtgggaacacctgctcatgttttggagcagtctggcaatttgaaatgtctcttaggcatggcagacctcaggtagagctgacagatctctgaactgggacaccattaactgtcattgcccatatcagaaccatggctttaccaattataaatcaggggacctgagtcaagttaattaactttcttgggcttcactttgctcatctgtgaagtggggaagtgatagttattttacagtactaaagtgaactttagatgagatataagatctcatgcaggcagatgctttgttatattgagttccttcaagcctatcttcaacactctagagggaatgtattcacttgcttttctttccttatgctttataaactggaggcggcttgagctcaggaactattactcagaggcaggttcagaaagggtgaataccataggaagccaaagcaatggatgcctttcttctttgtatctcagcatacaatgttaagaacaaaatgagttctcatcgacaggtgtgaccaggactcttctctaacatagctcaacccggaatttcatagactgattttttttctggtgctggggattgaactgggggccttgtatgtgcagggcaagtgtcctacactgacctgtgtgcccagcttgctaatggaagttaatactttgtctctgcagcctcctctccatcccttgaacatataccaagctagtttaagctggccaatgtgtggaatgtgggatacttttttctttttcttttttctttctttcattttttttgttttgttttgtttttagacagtgtttctctgtggctttgaatgttgtcctggaacttactctgtagcccaggctggcctcgaactaacagagatcctcctgcctctgcctcccgagtgatgggattaaaggtgtgtgccaccattgcccgggatacttttttctacgtgatactagggatcaaattaaattaaaaattaaacattatattaaaaatgaactgaaaattgctcacaagtaaggtgcagagtgacacacagacacacacacacacacacagagagagagagagagagagagagagagagagagagagactgaggtagatatcttctgtacaccaggctttgctcgcctaactcttatctgtggactttcattatatgttacaaagttatcactatcttcatgtgggaatatgtgctattggataactgacaataactgggctaaacataatggtcttattcctggagccatgcctagtcagcagaaaatgatgccctctactcatgagacaaattaggacaattgtatgccacttgatattcagtactgccacaggaataggaccctggctcaaacctcctcagcatgggaagaagggcataagagaatttaagttgcaaggcagctgtcagatgtctcctctgtgtttcatcattgcatcttacggaatagttgttgatataatgcctttgtatgattttttcccttctgtaacaactgaaatggaagtgttccaaactgaggaaaaggagagaaagtgacttgatcttggatggaatatttataaactgatgaggaattgttttcacccttgggttttagctgtgatggtcaggctgcgtcttactcatctctgtgtccctattgtagaggaagttcagtaaatgcttattaataaacaggtcagataaaacgctgcaaagtatgaaagtggtggtgccagtaataagcactagagaagcccccaaaagaagagatcagtgggaatctaggaagggaatctagctaggaagggatctgtgggaaggggaggagtctcagggaaggactgcactgtttgggcagaaatggattaaatatggaacgatcacagacttccaaaccacttaaactcaatgagcctcattttctcaccaaagcagcacaagtgtgtgtgggaattttgttttttatttaattttaattattttttgacagggtctttccacatgccccagctgtcctgcaactaactcatggtgtctgagttctgggcttaaaggcatgtaccaccatgcctggcaataaagaaaataaacttacatcataggcaaaggagaaatgggatccttgcaggagggattgatgcagaattggtcatttttcctttcttggcatatgtagccattccactgatttgaacattttcctgacagagttctggagttcttaggttgctgagattctagtcttcagtttagtgtatttcctgtcttcctacctcacagcaagcattttccagaaaatgtcagtagggacatgggaagcatccaaccacttccctggacacacaatataataaactggggaatctttgaatgctcctcttctgtttttgtgtttctcctgttttagttagttgctttgtttttaatatgggacctcatgtagcccaggatggcctcaaacctgtgtagcttaggatgacttgatccacctttctgcacctccccagtggtaggattacaggcatgcaccacaatgcccagctcaagcttcttcccagccggagtcttcctttgcctcactgggttcccccaggttcagatgctgttcatgtgtctcaggccacatcagaagctccgttcactctgcatcagctcggctgaggactcttgatttgcccaaaatactgacaaaacactgagggtccaagaggacaggtaactcgtctcaagatcacagagtctacgaggggcagttagatctgaaaccaaagctttgaccctctggtcctctttcttctgtgccctgggtgtccagaaacacaagccagaacaggagccaaggatgatctcccaaagtcatgagcacagtcaggactttaagacctgcatgaggtaaagccaccatacaacacagaagagcacttccaggtctggagacacaagtgacaaatcacctccttgctaggtgtccacccagacacaagtaagcatgcctgcaaggcatttgctcccctccccctcagcagggtttggttggggctacagcatcccgacaacctatttaaaccaacttgcaggaactggcatcaaagtaccatttcccaccaggcttgagcctctgcagcctcggaagagggagtctttagccgaaacattcaggagccggggatcccagaaggtatgtactaaattccatccagatgttgagtttgattttgtactttgtcttcttcttcttttcctccctaatcatacttaaagagtgaacaaattgttttcatgttatcaaacaatgtaggagaagaacgatggttccttcttttctgggcaggtctacaccgaataaatgaacaagacacttacagtgtctgggttacacagacaagcatctgaattcgaaattagcattctgtatattcagcagaattaccaggtggatggactgtattgcaaacacttcagtaaaatgcaaccagcaaccgcaagtcctctgtactttacagcttccagaacaatttacctgtgctgtagtgagcccgtctatttttaaatccttctagaaaactactgttgtacaagtactgttgtacaagtagatccaacagtaaaatgtacatgttactttattagaaagggagactaaatgaaactttctggtggcatctgagcatctcagtgcctggcagctttaccatcccggtaggtaacattcggacacaaaactcttctcctgctgccagcacagctctcctggggttaacttgctgtggggctaggatgaggaaaaacagatcttcctaggctgcagctcacttggctgcccttcagcccacacctgagctcctcccccctggaagagaaacctgaggaaaggcagcttagctgtggctgcactgacaggggcttcttgccagtggctgcttctgactgcaagcggaagcaggaccaggaatcagtgacactgggagcaggaagctcagccaagaagggagctcacttccagtcctcaagatatgggattttcaattttctcatctgaattggtgagtttcaaaattttagtccttagactgtgagcaaagccagggtcttgcctgtttaccaggtaaacacacaaggaaacagagactgttgaggtgttttgttgaactccttctgattatttatggcttccttcaacaatggtttttgttggggttttttgtttttttgtttttttttgttttttggtacttttaaatttgattgaactcttcagtggaaaataggttttaaagaaaaacaaaacggagccacccactgcacttcgggtgccttgcattttgacccagcccacagaatgattcggaagaatctctgcagacctccaagatccttgaattctatatgaaggaccatagatgtgaaaactccgtcttcatttcagtgcccttctttttacctggaattatcctcactgaccatagagagcagttactgatgaatcctgggacaggccctgtgcagtgagaggtgagcgcatctggaagaagaaatttattcctctcagcgagtgttttaattaatattgtgtctatactgtagttctatagctaataggaggcataattatttcttttttattgtcaagtcctctcaacctttctcagtatttaatttagttttgcctctttgcttctcttgtagaaaactttcccccagttttggttttagatggtttgccctggtgcattctgtttattagaattccagaatcacactttctgggtgttatttgggcacaaatgttcccaaaatatgtaagcacttaaatcattgtaaagacagctggccatggagcacatcttgcaggcaggtagccaaaacagcaccagaaaatagaaggatgaaggattgaaccctaccccgtggcagaatgcagagccctactgagatacatggggaaaggagaaggtcccttatggagggatcagccatgttgcagagccaacaacacggaccatcagaagagcaaacccaggcgggaagggagccacccacacctggaagcctgacatcagaaatccaaccagcctccaactgctctgtgaaataaggggaaagagtgagccccacactgaaggtacagagtgtctgtgtgtcatcctctgaagacatggggactccatcatgagggcagtagcgctggtggctttgctttggacacagtctgtagcaggacagcccatgcaaaggcaattaggtggaaatggggatcattatagccctttgatttggttcctccaatatccggtcaggcagatgaagaaaagagactgactcttaactcggaagtaaattgcaggtggaagtatttggtttcagcttctttcaggttgaggctttccaaagcagaattttgtgtgttcaggaacccaaacatgggacattattgctttagagcccttgcagagtcagaaataagaaaacaggcagccaaatggagacaattggttttagtaggctgctattctttacagtgtggtgacactcattctgtgtcagggctttgaaagaggctctttcaggtttcacaagacagtctggaggaatctcaaagtagaaagaattccaacatgccttatgtcacttgcacagggacggtttctctctatcaagcactgatgcctgtggttaagcattcaggcatcaggcaaacttgccagaggttacagtaggactcgggaagcagaagagccaagcagactggacataagtagctgagaaccagagccaggatgaaatattcctataggagagaaatggagctaggaaccagcaagctccgatgtctgccacaggggttcagtccatgtggcacctttgtccgagtcaagaagagctgaactctagaggaaagtgttcacaggcacgggacttctttccacggggtggggaagacttattcagctttgggggaaaataagaaagctgcacagccagagtctgcatccaatctaaatacctgtgtagctggctctgcggcaatttgtggaacctgtcgaggactgctttgtgctcacaggcagctagcttgaggaaaaagcagagggatgggcactgcgacaggggaagggttcgatccactcactccttgactggcctcagcaaaggtagagaggatcccattaaaaatcgcctgctggggagcctggggctcagtcttcacctgcacccctacaatattgttcttatagaatttcaattccttcctctcctttatgggcatttttaggaagtgtcagtttggaggaagcgtattaagtatgaaatgttctaattcaccatatggatcttattacacatgtgtcgggatgccaggtgtgacactccttggatttaaaaatagttttgcactgcctctctaccttctattgcctgtgaggcttttctgcactcattgacctgcccaggcctccatctttgtctgcatcaagtgtaaagtaaaaatgagctgcttctgctggcagggattcatgtaggtgagatgagagcagaacgagaatctgtctcagctgcaagagacggacaagttcccacgctgttggtggtgacaggtggttattctacaatcacttaattttaaaagccatcctcttatcctgccacccccaaactcttaaatattctgagaatatgtagactttcttttttgtttttactttgagaaatggtcttatttgggccaggttggcctggcaactctatgaccttgaattcttggtcccctggacttctcctgatgagaaatgtgcagattaaattgtgcaacccacacttggccatgctttaagtaaaaaacttattgagagaaacacacagtgtttgactaagtgaattttcactgtgactcctcccagaaaaagagaacctaggcctagaaacaagaaatgataagcatggagaacccttctcctctggtcaagacccacctcctcctaagaatagccataacccacccagagtgtttgggatctgtggtgtgtgtgtgtgtgtgtgtgtgtgtgtgtgtgtgtgtgtgtgtgtgtgtgtaagcgcatgtgtgcatttttatgaatggcttcatgtgatttttgcaacacatcagccccatctcattttgtgctttatatattggaaagttcaactcaactttcctttatattagcaaaataaggattcaggcattccacattttggtggatatatctcactaaatgtggcatctatgtggaactgttggcccatacaacaaatgtctggaaggatcaaatgattaatataagacattccttctcattcataatttcagacatataatgctcttaattccaggcgatttcttgtatttcagtacatttatttggggtatgagtcttgagtttagaggttcgtacatgttaagcactctggcctgtgtatcttaatacttcagaatcaggcatttattcccatgataatttttttctcagctcatgtatcagatccttctaaaaatttctagggcacttatacatatgaaatggactaaaggaatatgttcctctactgtttcctatatccactgaagaattactgccacccttctaccctcagaaggtggttcattctttcaaccaacagtatttactgagtgccttctatatggtggttctattccagaccataggaatacagtgttttattttcagacaggtttttatttatgtagctcatgctggtattaaactctcaacagtccgtctgcctcaacttcctcaacatgaggactatggggatgcccaccatcctcagcttacaattcagtgttaaagaaagaaaactcgggggtagactcagttagaaaagcacttgccatacaactgagcctgcacataaaaatctcagtgccggagaagcaaagacagcacgatctctggggctgaagttcaggctcagttagagaccctgcttcaaaaaataaggtagaatgattgaagaagacacctgatatccacctatggtgtgcccatgtgcaagtgcgaaagagtgagtttgaaagagcgcttgtgctcacaacacacacacacacacacacacgaatgcacacttgcataacatacacacaacttgcacacgaggtgtacacacagaaacatggacatatgcacaaaaaagaaagcattgaaaatggaatgtaaatacatatataactagtgtacaaaatcctcaaaaaatttaaattaaaaaaaaagaaaaattgaagaacaaatgacacagggcaaaatttaacagataatgacagtgctaaaatggaaataaataagataaggtcaaaggttaactggaaggtacttactttggagggggcaggaaaactctgaggtaatgtatgggaataagacttgaggaataagaaccagctaaggaaatggcaagtcccagggctagcatgagaaagaaagaccagtgtggctataagtctactaggaggataagaatgaattatcctggaaaagacagttagaggccagatcatataggcccttataagccatggtgaagaatttggacctaggcaataaaaatcatagagttttcaacagtgttccaatgtgttctcagttttcctttttttttttttttttttttttttaaacatgcagacacagttcacaggtaggggacaatgtagattatatgtgtgagtatgatgggttctgacagctgcacaggcagttttccaaaatggctaacatttttattgtcactttgagtcaggttcttatgttgctcaggctgacctgaaacttctgatctcaagggatcctggtctccaagtaaccagtacaacaggatcctactgctgcctctggctacagtatatttttaaagtcctgtcagtatatgttaagaattctcttgccaagtatgttagcagagactgggatgagggtaagattttgaggcaaacctgagctacataacaagaatctgcctcaaaaaaacaaagtaatacaaaaagcaagcaagcaaacaaacaactcaaaattctcacaaacatttggtaatcagagatttggggtggaagtgttttgtttgttgatgttgttatttattgtttgttttaggtattctaatggatacaattgatgtctcacttggctttgtttctttgctgcataatttttttttttgctttgtttttggagagagagtttcttgtgtagctttggagcctatcctggcacttgctctggagaccaggctggcctcaaactcacagagatccgcttgcctctgcctcccgagtgctgggattaaaggcattcaccggctgctgcataatgtttattggtcatttatgtatcatctttcactgtccctgtcccaaggtttagtacttaaagaaaattgtgtgggcacacatgcatgccatggtgtcatcgtgggcgcacatgcatgcaatggtacacatgtggaggtcaggaggcagcttttgtgagtcagttctcaccttccacctgtacatgggtcccgggatcaggtctttaaacttacacaagtggggttaccagttgagccctctcactggccctgcttgtttgcaaagataggatcttgctgtgcaccctggggtgggttcaagctcctcagcttaagacattctcccacttccgctttctgagtacctagaactacaagcatgcaccatcacacccattggagctttaaaaattgtacctgtttgtctttttgttattgaatgggtgttatttgtatatagaggtttttatttcatcagacattgtgtgttgtaaatattttctccagggtatactttgtgtatttatcttataacagtatattttgagtctgagaacaaaacagaaataagcaaataaacccttgtagttagaaataattttaaaattattgaaaaagtaaatgcacgattctttgtgagttgacctttttataatgcaatacctttgtttctgttagttccttttctctgaaatctactttggttgctattgattcaaacattcaattgtaaatagaattcttaattggtctaagtaaaaagaaaaaaaacctgcaagatatcaccacattcaattttgttttgttttgttttgtttgcctagtgttttcatgctatgaaatttaacctaactatgacattacatttgaggttattattattattattattattattattatagataatatgtagttggttcatttaaaaaaattctcctggggcctttagaaatgactcagcaattaagagtacttgctgctcttacagagcacctgggttcaattctaagcacgcacattgatgattcacaaccatctgaaactccagatccagggaatctgatgcatatatatgtatgtgcaggcaaaatacacataaaatagactttaaaaaatcccattctgacaattgtgcacttcgtagtgtttgatataataatgtatgctagaattaaggtctatggctttatttttttctcgtattgacctttgtttctatttcagtttcctatgtattggtttatcatcttgggcagttttggtgagtgatgaaggtattataacatatacatttaaaattgcagtctgtgtacaatcagtgtttcaatcaggggagtattggaacataccattagtatgttttttttcctttacttcccactttacaatgcaattatctgtattttttttttacacttacacatagaaaaccccaacagagaaaaatcatagcctttgcttttaatcctcaagcattttagatgtttttaaattatgtttattttgggaggagacatatgtgtcatagcacatcagacgacagcttgcaggagtccgttctctccttccaccatgtgagttccagagattgaactcaggtcatcaggattggcggcaagcacccttccctgctgagccagctcactagtcatcaaacagtgggaaaacctcacagagtaggaactgagaagtgtttttacctggatagttcccattctgccacttctccttcctccttctggcatcatttccccttgctctgaagaaaccctctctcagcagctgttccagagggagtctcctaacagtgtgttctcattgtctcctgctacctaagggtatccttatttcatggtcatttatcctggctatagtcatcatggcacatagaattcagggagagcgtttgtttatcatgttaaaaatgtttcacttcattttggtgtcaatggttgttgtcgagaaatacacagccattaaatcagtttgcctgtcagtaacatgtcgcttttgtgctgtccaatttcttttgttgttgttttccatttaaaatttttatcttattgtatgtttcctccgtgttgtgtgtgtgtgtgtgtgtgtgtgtgtgtgtgtgtgtgtgtgtgtgtgtgtgtgtgtggtgttgtgtggcataaagtgaggctggaaaaatggcctcatttcttagagaacatacttcttttccagaggagtggggtttggctcaaagacaccagagggtttacagcttcctgtaactccagctccaagggactgatccagtgtctctggcatccttcagcacccaaactcacatccacatacctgtgtgtgtgtgtgtgtgcatgtgagtgccttcatgtacacacacacatacatacacacacatgtacacacacgtacacacgcacacatacatacacacagagttaaaataagtgttttttaaaaagtacccatttccttccaaacactgttgcatgtccaacccactcatgtcaatatgtggtttcaattatttttcctttcaagtagtttctatttttggacctatggattgtaagagacaggtgtgtttgttttcaagacatttggagaattttccaaataacttttcattgtggttcttaatttaatactgttgaggctctatcagactctgtattatttcagtcttttaaaatgtactaagatttttttatggtaaagcatatggcttacattaatgaatagtccagctatatttgaaaagaatgtgttcttttcagtttggagtagaggattcaatagcggcaggcaggtccatttggtttacattgcattattcacaatttcctaactgattgtgtgactgtccaatccatctagttccaggaggaaggtgcagacactggagcagcagctgtgtattcacctacttcttcctttcctctggcaacttttacttcttatattttaaaactctgttgttacatgaatatgtttttagaaatgttacgtttttaaaaaaattgtttgtttggcagtattgggaattaaactcagggcctcatgcatgctaggcaagtgctctgcctctgagttacagtacaagactaaaatgctattgtttaaattacacactcttctatcatgaagaaatattccccgtacctatcgctgtgctcctgtgccctcaggttactttacgggtgtttgtagagccacttcagctttcctgtgactcctcagtacccttctccttttcactgcattagcatgagcctttcttgagagcaacatccagtttggtcttgctttttcatccagtctgggactgtattgatattagagttctattgctatgcaacgaaagactgtgaatttaggagctgttaactctcagtctttcgtcagaagtctgacctggtatatgtagtctggctcactgctacgggtccaacaaagctgaaatcaaggtggtggctgctggtgttcccatctaaaggaaggttctactgccaagttcgttctggttgtcagaattcagctttcctactatctcattgaccattggctgctagtgacttccctcacctcaagagggctgtatgcataaatcttcttgtgacccttccacaacatagtagcagcagaatctccctctcaaccaatccctctcaacctttgaacctctttgacttctaccaccaaagggagaaaatgcttctgttgctcctgccacctgaaaagcatccttattttaacatcaattgaatggtaatactgatggcaagcaggaagtccctagggggcaaaagtcatgggaccatcattgaattccacctactacatcactcctatttttaatgtctttttattttgagataatttaggatatttatgcatgtgtgaagtatgtgtgtacctgtatgtgtgtgtgtgtgtgtttgtatgtatgtacacatgtacgtgtttgggtacagaggccaggtgttgatgtcttcctctattgagctccatcttactatttgagacaatctctttgctgaacctagacccgatcaatttggctaggctggctgaccagctaatgagctttagggagcctctcctctctgtcttctcagtactggggttaccagcttttatatgggtgatagggaaccgaactcaggctttttcaacaggcttttgacctactgaatcatccctgtggcccctaatttataattatttagggaaagctgcaaagctttcatttctgcacacctgtggtcctacttttccattgttctctgtgtgtgcatgtatgtttctgttcgtatggaggtccaaacgcaaccttggtgtcagtcctcgctctgcttcttgtttgagatgggctctcttgtctgcatctgggaacaccaggataagtgactcatgattctgtggagtctcccatccctgccttccatcttgttgagggaaccatgggatgacagcagacactacctagtctggctttttatgggttctggtgctgtggaatattgttttaactgtgtaaaggtgtgctatatttttctgctgcttttgttaacgatgggaagatgtgttacaattgtttgattaaataaaattaatctggggtcagaaggctgagtcagcaactagctgacaggaagtggtagagaggaattaagtgtattgagggctctttagtggggcttgagccaaaggacaccctgttttggggagacacagcaaggagaaaaggttaactacttgctcttcagcctctctgagcaagcaaaatttcacctcaacctttgactcctgagttctatagacatatagaaatctagataaagtttcctctagtggccacaatagagatgtgcctgaaggaatagagttcccacatggctgcggccagtgtggtggaaatgctgctggtagctgcagagatgaaaacaatgtcctggggatcatgtttgcttggcaagcactttactgagatgtctcgcagctctgtttttgtttgttctcagctctgggaattgaaccaaggatgattttgttttgtttttgaggcagcaccttattaaacagcccaggctggtctggaactcaggctcctccagtttcagtctctcaacttctgggattacaggcacgtctcaccacacttggcgtcgcttcctttaatattaacaacttacagaatcatagcatagtgatcaaagctagcacgtttgtattgagggaacagtgcagtcagtgacgttctatcggatctcaccggtttttctctccgacatcattttcataatctgagagctggttgaggtttgcatattgcctttagttgtcatggtacctgttatcctcttaattggtacatcctcttaattaatacagttcctctggaatttttttggggggggtctcttctgacatgaatctttgaagaatactagccacatattttataaaattttcctgagtttaggtttctctgatgctgcctcaacattaggttaaagttatttttagtaaggacaacacagaagtgatgatggcccttctaccatggaatccatagcctattgtcttattggtgatattaatccaaaactcccagttagttagatttgagaaatccgagtttctcaactttggaattattattattataacctttataatagatattttgtaggaatattttctttctttctctttttggggggcgggtgtttcgagacagggtttctctgtgacttttgaaactgaacccaggtcttctgcaagagcagcaagtactcttaacctcagagccagctcattccttttatttttatttttaaaagagttatttatttttatttttgtgtgtgtctaagttatatatgtatgccatatgtgtgcaggtatttacggagtccaaagaaggcattggggcccctgaaacttgtgagctacctaatgtgggtgccaggaaccaaaccaaagtgctcttaactgctaagacatctctgcagcctgaaaggaattttaaaatgagaaatagttcgtcattgcttgaaatattgcatttatttttcttttctaaaacccatctctctctctatctatatatctatatatagatatatagatatatagatatatagatattttcattttaaaaaaatgagtataaagcaacattttctcaaacccagaggtgtttgggggctgcaaaaacagagcaattaacactgctatgaaagggaagaccttgaaaacctttctctggggttttgatttacaagtgcacttgccataggactggagctttggttaagagagaaaggggccctgcaaaacgccggagattaaggagaaacagctgtagtaaaaagcatttgactttaattgtgtggaagataattgggcccgtttgatttctgaaagatttagaaacagagggctccagaggaaacagataatgactggagaattgcagtacaggaccgtgagcttccagcctaagttatcctaaggcggattgtctgcaaactaagaaaacacttcaattaacatcttccaaatctgtcttcaggctttattaaagaagctataaatatatcagattgttcagaatggtctccaataaaactttaattattttcctcataaacagactttatgtcctgggttcttttttgttgttttgttttttcaagacagggtttctctgtataacagccctggctgtcctagaacttgctctgcagaccaggctggcctcgaactcacagagatccgcctgcctctgcctcccaagtgctgggaataaaggcatctgccaccacgtcgagcatgtcctgtgttctttggcttaagattctcatcatttacatgtcagaagttctggagatctttttttttttttttttttttgcttctccctttcctcagtccttcctgacagaacaaagccttagtttaataccaaactactttggactcattgcaagccatattcaattatgacacgcaagacaccagcacctgcaggtctcagtcatccattttaggcaaattccccctggaaggcaggggtctcctcaaagctgggtattctgcaaagataaggaaacatttgctttagtgacctcttcttgctcagatccctgcagctaatttttcattttgatttcacgttctcttacctacagaaagcttacaaaggcatgtaagcttcagaatctatgaaacctggatctgcccctggactcaccaaaaagcccagcactgagtttttattgccaaatcatctgtccctcactatcccatcccagttgtgattggtcagtaggcttcattctattattctgattccgtctttcacaggacaaatgtataaatatttagattctgtctcttctcctatttagagagttaacttagtcagagggggcctttcccagtttcagggctcatcctgtctggcctcttactgacatcttgcccatcttttctctcttctgcttccattctttttaaaactattctcgcctgtcagtggtggcacacacctttaatcccagcactcgagaggtaaaggcaggccgatctctgtgagtctgagtaatctacagagggagttccaggacagccaaagctacacagagaaaccctgtcttgaacctcacccccaaagtatttattttttcacaatttcatacatatataatgtacttcaatcatattcatctcccccattattctctcatgccaagtccttcttcccgacaaactcccttgcactttcctgtcttctgtgtgtgcaggtgtgcacacactgagtacccactgcatttaattaggagtgcttgcactaacacaggtgaggttatgtacttgagcaagggcattttaccagtggctactctacctaggattatgactccataccccagcaaccactaactccctatagctcctcagggagggaaggggcctcacaagccctcagacttctttgtggagacagaacatctcctttgcccctagacttgagatttaaaaagaacaattagcagaataaacctttttcgtgactatgtaaattagagaaatcttatgactactgttttgtttgttttattttgttttgttgagatagagtctcactatatcaccttggctgggctagaactcactaagtagatcaggctcactcacaactcacaaagatccacctgcctctgtctctgccttctgagagctaagactaaaagcatgtaccaccacacctggcccatggctacttgctatatgttaaacatcttaattcctagtccatgtcttctcctctcacatgggcatactctacaaactaagtcagtgaatggatcagcattctccacatatgactgtaatacatgtcttagggatctcattgctgggatgaaacactatgaacataaatgacttgaggaggaatgggtttatttcagctcacaactctcaagcattatctaactttctgttaatctctccagcaaattttctttttctctttcattcctccttcttaattttattttttacaaggaatcactgtgtaacctggctggcctggaactcaccattggtaaatttatcagggatgccttccatgtacaaatacaaatgtaggtcaccttaatttggagcttcatatttaatgatgagggtgtgggaatgcaagctgttcctcagctatgataagtctttcaaaccaacatacctttcagagacactttgcttcgcataagaataaagagaaaatagctggctcctgtgctcatttgaaaggggttttgtagtagcaaagctgagttaccctgtgtgacagcagaggctgtgggctgtgaggcactcacatttaggatgtccacatgagatttgccttttgaatatgtttggtttattcacacaagcattccttacattaccatgctgttgtagagattatggaagtctcttgaaaacaggctttgggggggggcggggggaggttaggaaatcctgcaggattctactagggagtcctctccagtgagagcacattgggaggaagctcaaccagcatcctctgggaggcccttcagctgtggaaggccaggatgatgacactgtctgaagtgcacaaggtccttgagagcattggacagtggttagcactgatttcagaacattgccaggaaacttgactgtcactagtcactaaagttagagctacagttgtcagtctcaaaatcctgttaccagtagggatcattgcagaggtttaagaagccatatctctgaagcctggtagagccatcctagggctgcctccaaagtttcagtttttgtattgttcccatgagctttaagctttgtattatcttggctcacagataagagtttatttattaacaaatgagagccaccttgggtggttcattgacatatcagagcatgccttaggcttggctcatattggaactgccttgtagttcactccttacctagaaagcattgcattagttctagatacacaaaatagttttcaaggtacaaaacaatggttccacttatgttactaacaccctgttctccaccaactacacatatttccaaagcgctcagacttcagcaaggctggggaaggaaaacatggcagaaggattagaaacacagaaatatcaactttctgctgggccttcttaagggccttctttgtcctctaatgcctctctgatttaccccaggaccaaggcgggagctgtcagtagctcagttaccctggaggaggcagagagcatcaacagatgtttggcctgccttcaagacaggccacctctcctcagatggctgtcagtcaataagaacttccacatccctttgaagagtcacagcttttctagatgagaggaaaccggcaccagcttccagagaggacagagcttaaatctgtagactccagggcatgaggagaaaggatatagcctgtactttgaagtgttgtttctgggcctgccccacttgcttagaaacttgacttcatccacatctgtcctccaaagcagatgttgatgggaagaaggtgggcagcacaaagagatttccaatggggattcccagatgtgagctgtgagagagatgaagcacagccccgctgtcaagttcagggacaacagtgttcctgttctcttgagatgtgcagccaggcagttttaaacaaagtaggatcctaaagtaggaataggtgatagagttccaccctttcttctattgcctgtcttcttaggctaaaatgatcttactttcccagtcatacctgatttctgtctgggaagtaactgatctaagttaggacaattaaatagagcttggtttcctagtcctgatatatttgccaaaacaattctatgaaggtggcaagatgaacagaaaaatatggaatctttgcttcttaggtactatgaagagtcattttagaagaggcagtaaagaggatgttacaagggcctggctgtagcataagctaatagaccaggttagagaacagaaaaagaggaggctcatctacacactgcttgcaggcagctttctaagtgactcctcgatatttgaggtccattatatgatcagtggatattttaaactgtgtttaaaacttataaccttggcattcaagacccccataagtgttctaaatgtctccaacctcatttcccactactaactttctattagttgatgaataccctgtctattggtttaacaatctgattgggaacaccagctatcaggcttagaaatttatctaatcttgtgttggagaaatctccctgtcttccattggcttgatatagtcctttggttaaaattctggcaaattttgtgaacatgtaggctccacaagggcagagactgggtcccttctcactgtgtatcttcagagcctcattgtccaacatataagagacacttgattcatatttattaaatagatgaatgagtgaattgaggaacaccttaagcactagaaacaagtagaatcaagatgaccagagagtgagtggctggtgagaggagaagacagaacaagaacaaaggctgatgctgcttcctgagatctaagatgagccagctttatgggaattcctttacagagaaatacatttggcgcttagggatggaagaattgggatggacatcaaagaatgaaatgtgacaggagctgagggacagattgagctggtgaggcctgagccagagaacagaacaggggagtcagtggccgagagaatcaatcaccaaagccacagcgccagggtagatctattgctcctgacaaatggtggaagagtgaccctgacacttctggcctggaaaatgtccttggagatgaggatggcagcagcaggagaaatcacagaaggggtgggggtggggcagtaaaatgacaggttaccaaatcacccccaaaacttgcacagtgaaaaacaatggcggtatgtcaagaagatctagacaattacattgaagtatccatctctaagggcaactaaacacacttcagctacactggctcctacagttcagttcacgtccccagagtctgttctcataccagggctgggttaggcctggcctcgtgggtaacactggcccaactgttgacaatagtttcagccctgtcctgagccaagacacttagcagctatcagtgtgaactttgaggacttgagagagaagtatcccttgtactgaatgttgcctactaaaaagtagttgccttgaaatccacagttgaactcgttcctcagcctggactattctttgcccattcttgccaggactaagccttactcagccttcaggttttagtttaaaggtcattgcattgtattcctgcatctgatagacccaagtgagctacagcattcacaaaaatattataaatgatgatgaacctgtcaaaacttcttagagtcacttcttgcaaacaacaatattattaataatgagttgatgataaccaggcataaaactcaaatgatgttacaaaggacagcttctcccttctcccccagggttcttgcacttaagaaaatcaggcaggaatactacatgtgaaataagacatttcgggaaagcctctgtttttctgatctggtcttctgctttcatatgaccactctggctttctctccatcttttcctctgcttttgtctactcgatcccttccttttgtctgtgtgatattacacatgctccccagatttcagcatttactgaaatcaagcttcattgttttctttttcctttcctggtaatttgattcaaacagcccagagaagagtcctgttttctcatgtgttgatacaaataagaaccaacaatgctctgtgatctgggaccagaagaaagaggtacatgagagttcacagccagcggccgcaggcaccactcaatagtttgttctgtaaaaattatctgcctcctattcttacctaaggacataaatgcagttttcaagggtgccaagtgcaataagtattagctatacaactctttaaaatgctttattgcctgtcagtggtagtgcaagcctttaatcccagcactcagggggcagaggcaagcagataatctagtctggtctacacagactagccagggctacacagataaaccctgtctttgaacagacaaacaaaacaaaacaataaattagtattattagctggggataagggtcagttagtagagttctttcctagcatacatgaagccctgggttcaatccctaacaccacataaactggctggggtgaaacccacttgtaatcccaacatttgggaggaagaggcaggaagatcagtagcctacatggagagactcaagccagtctgggctaaaagaaatttcatttcaaacaacaaaacaatcaaaaacaacaaaatataaatctcattctctatctcattttattcttccaacacacttggaaggcaagtgctgttactattttaatccttagttacacataaggaagatgaggttcaaaaaataaaattacccaaaccatccatctattaattgccacccagtacacttcaagaagcccatctccatatgatctgttcattatgctacaccaaaaatagttctgcattacaaaaatcagagtgaacgtagaactgtaacaaataacaaattattttctacactgagaacctagaaggctttgggaaagtggtaatgcagttcaacccttcctagacctcttctgccccacagtatctttctccctttctctgagagaatatccagaagcatcttttggaagtcagcagctgctcagaagcagtttacacttgagtgagttattttctaatcaggcagcatcaggattaggctttcaagatctcagtgacatcatttttattttagtttttgctcatggttcctcacttataaactccgttctctggggaggttttagacactagagttttcttccctgtggagggctacagcaactttaatttcccccactttcctgccttcaattcatcataattaaattctctaacctaccttgcatgacaataggtcatcagaccctcctcatcctaaaagtatccaggaaaaaggaatgttttagagagggcaaggagaacgtggttatacaggccttgctaggtctccttgttctgtgtattcacaaccatgcctatgcagtaagtctccatataaagtcagaaggactggtcaagagtacttttggatagtgcaacatgtggtatcttgatgacaagcctagagacagcatggaagctctgcccacatcttcatgcatatatttcttaatctacatccattgtcatgtcctctataataaagtggtgaatttaagtgtccttctaagttctgtgggctcctggcactcagcaatcaaacccaagcagaggattgtgggaacctccatatgtagctgattcatcagagccacaaggaaaacaacctaggacttgtaactgacatctgaagtgtgtgagtgatggggacacttagaagtgtgccctcagcctgtgtcaagaggtgctgtctccaggttgactgtctcacaactaaatgaggtcatgtagctgattctgctactgcaggattgtacacaagcatgtagcaagaattcccaacatgttgtcgggtcacagcatcttccatgttggttgtagtgtaacaaccttgcctggacaatccccaaagccttgaacaaacattcaggttattctccttcaacccatccttcatatggtcaccaataatgtttcagaagtgtagaatctgttcatgtccttcccctctttttttaaaaaattatttattgtgtacagtgttctgcctgcatttatgcatatcagacaatgacaccagatcaccagacctcagtatagatggttgtgggctactgtgtggttgctgggaattgaactcatgacctctggcaaagcagccagtgctcttaacctctagcctgcccttctcctcttaaaatcacttaattgctcctgctttgggctaaattgtgcccctcccaattttatgcagatgtccaacgccagtatcttagaatgactcagtactgaagattggtaattaaaagaataattaagttaaaaggaggtcagaaggatgaatgctacctcattatgactgatgtctttataagaaaggaaatgcagacattgatgaacacagagggaagacagcatgaagacacttggaaagcacagccaggtacagaacaaagagagggccctctgaagcaaccaaacctgccatcaaattctcacaccagtgagaataaatatttctgttgtttaagcaacctacctaatctctggtgctttgttatggtagcccttgttaaggtttcaagatctacaacataagcttaacctggcattccaggactttcccaatgatcttgctttgcatgtccccacctttctccacaccatgtagaacactgaatgtgtcttgagtcctactgtgctctatctgcgtctcactttatctcctaagtctcagcctccactgccctcagcccaggcagcacgagcttcccctcctctgttggaaggtatctccctatccgcaggttccatcacaaggcacagtaacgggcacatgtctatacacatctgtcaagccaaaactaagcatggacggaagggaaagtgtcagggaaaccattctctgtcttttttcctcatagatgaagagcctctgaccattatgtcaccacctcaagctaacaccttgtctcacctcaggtttaaggaaaggctggccctgtggaaactaggacattgagaacacaacttaggagttgaactgtctctaccatgtcctcctggggcctccactctcttactcactgacttctttagattccaagttctgtctcaacaaggatgctgctgtcaagggggttcctgggggaagaagggattctctctctgtctctctgtctctgtctctctctatctgtctctgtctctgtctgtctctgtctctttctctctgtctctctgtgtctctctctgtctctctgtctctctgtctctgtctctgtctctctctctgtctctcccactccttggcctgtatacaattaaaacaacaacgtttaaaccttcctccatgtaaccagggtaaacaggcatggcagctccaggtttacatggcagcatttcagcatcccaagagaacaaacaaattctcacttcagaaaaggactctgagcaccattcttgcctcacaagactgctccttgtgccagctgcttttctttcaagaggaagagagactctgtttttccagtgctgaggcaagttcttcctcctctgctcccagtcccacacacatctactctggctaaggggatgggcgtggggtcttcctagacttattagctacaacacatgttgcagtgagtgctgacacaggcctgcacacaaatgttcatagcatgttatcacagccagaacctggacgagacacaaatgtctcgtcagtgggtggggagataaatagtctgttatataaacccaatgaaagctcagcatagaagggagtaagcctttcaccctgagtaaacttcaacaacagcaagctgagcaaaagaaggcagacacaaaccgcatactgtgtggctccatttaatagaatctttagaaaagacacaattgtactggtttcctggaagtgtgcaagaggtagccttagacagccataagcaaagatgtaaggtaatggtaaaatcctggagactgagtggtagcgatttcacagatgtatacattatcaaccaccagtctcaggcctacactcacatgaacagatccacttaatggttatttacaatatatctgtatataacaagcactgaggggctgaactgacatctcaggataaagcccaggagttgggaatagtccccaaggttctggttgtacaggccttcccttatggtggcatattatttatgatttattaaagtttgcctgaggattcaaaaagcaaagtcagcctcaagctatagagatcaggcagtggaggcacacatctttaatcccaggactcaggagacaaaggcagatggaactctctgaggtcaaggccacccagggctacttgagactgaatcagtcaaaaagagtaacagagctcacgcctttaatcccagcactagagagatataaaagatagaagcagattcttaaggattcagtctcaggattctccagccacgttgaggagaacatagtagtctggaattacagtctggtgtttggtggagccaggatcccctttcagtctgagatagagataagagctagtggctggctcctttgcttttctggtcttcagcttaaagcttgaagcttgaagcccaatatcggtctctgggtcatttatttttcatgctacaatccctcagtgctcccttgtcgtcttcagcactttggcaccatgataattacagttcttcagcacttctaagctgcctgtcacctgagtctttacaggggctgttcctgctgctcatcgtagtccactaagccagaagctttcttcttattcagccccaaattctggaggaatggaagcatctgtgctgccttctttaagcagaatgcaaaacctatcccccttttttctataacaggccacaaatgttctctttttaaaattttcttgtgcattgactacaatagtggaaacttctaaagacaagcgtgaaagaaatttcttccacagaaataaacgttggctatttgaagtaaacatttggaaaatgggaattaaggaaaactccttaatgacttaccctgtgcctcagtctgtactatcattctttacctcccggtcagaccaatgacatcacaatttcagaggaaagctgaggtctggcacaattatggtccaggacattctccccttctcaagcatcttaaacaatattctcaaacgtttattctaattatgaacagttttcctgctaattattaaatccatatgtattccaagagaaattgaatcctggtttgcttcattcacactcaatccatcacggttttactttcaagagctatttgatgttcaagaatccattagagccccataatgcctctttctgagaaataggatatgggcaaaattaagcaaaaccaaatgctcacaaaatcctccgagattaagtagaatcttaacgaggggaattatgctacactatttgctgttcggactcttcagactccaaggaagtcagtgtaaccggagacgtctcacatctttatcccacattttctcccggggttgcagggggaaggggactgtggaaagatgagaaaaaagagtagtttgacaggatagaattatttgacattctgtttccagcagtatttcagtctagaatttctgaagactttttgatatgaaacatctaaaattgctaaccttagtatcatcaacattaaaaagtaaagtagaagtccaggatatcttcccctcaactaaatagctaaaaaacacaaagggagataagactgggagaaaaccaggagttgatcctaagcaggggtagtaaaggatggctattagtcaacagtgaaaggtctgcttctgggcctactcttgggtgtgtactactgtgtttgatatgtgtgatgactactcttgattgtcagctgctgggatttaaatcaccgtgcaaactaacttcgggcaagcctgtgagggggtttctaggttaggtagttgatgtgggtagaccaactatatgtgagtggtgccagtccctgggcaggggtcctggactggtaaaaaaaaaaaaaaaaaaaaaaaaaagggagaaagacaggtgagatgcagcattccctgacctctgcttcctggctgtggacacagtatggccagcttcttgatattctagtgctataacttcctccacaaaatggactatatccccctgaactgcaaccaaagtaaacttttccttccttaagtatcctttgtcagatattctgtcatagcaacaagaaagttaactaatataatagtaaattagccaatccaaaaaaaaaatgataatgcatgcattctaggagccactgtcttcttcttccatcatcccaggatcatgtgaccaagaaccagtctgtagcttagagcttgcttagactattcaaagtagccaacgaactgcatcctgcccttgtcttcgctgcaaagccccctccaaaggctcttccctaacactttccccttgccctgctctctgcaccctgagaaccctgtgtattttcaacaaggctcctggttctaggactgtgtccctgactctctcctttgtctcctcatgagctgcacctgactgcccaccacattaaaaaaatccaaacattctctaacacaccatgggacaacacattgaacataccataagatattgaacatattttgtgttgcaaataatattgaaaaatcaattttatgttctaatttgcctatttttccagactttatggcccctgtctgttatgcaattttaatagtaataagatagatctgttggtactggcatgggaaaaaaaccacaatttattaactgaggaaagtattgactaaaatgtatcttatgatgacagtctcataaaaagaaaaaacacaatctgtgtgtatttgtatgtacataataaaattctggcagagtttcatttcttatttctgtatattgttccatttttatgagtctttattttccttataacaagaaaaacaatataaatttctagttagagaatcctgaataagcaataggcaagaccacacttggggctgagtgaggatgtgtgatcactgtaaagtggccaatgctttgtcccaagccatctcttcgggtgctcaaactgaggcttaggggaaagaggtactagtgtgggtgaaagacctatggttttcatggaggaaagagttagagaagagaaagtgcacactttctctctctcacctcgtagtagtagagccagagtatggagaacataggtctacctggaaagaagacagcactacaaggatattaggttatcagatgatgttaacatgagtctcttggtgttactgttgtcatcatccctctcctcctccccttccttctttcatttctctcctctgtctaattacatgaaaatcttgctaaaaggtggaagagatacagctggtctgacccttcattctactttatatgttccgatccagactcaggactaatcagatattagctggtgaaagaaatgagatagtagggagatctcttcatggcctccccagtgatcatctcagatacgtctgtgtagtcagcagggaactgtctggtacagaagtctgtaaggactttttcagcctgttcctctgggatccatgagggttgctatcccatcccaggcaaccacttattaagagaaggatttattttgcagtcattcacaccagatcctatttgtaatttaacagcttagaattagaataataaatttcctatctgcctaagttctctgtgtatactcctgtgtaacttctctgggatttttaattcatgtgtcatctacaaatgtagtcaaaatgcagctcattgtctagataaaagtagattttctattgcaataataccaggtgtgtgtgtgtgtgtgtgtgtgtgtgtgtgtgtgtgtgtgtgttataatctatggatttaagactattttttgaaacaatgtctcactgtgtaatctgggctatcctagaacttactatgtagaccaggatagcctctaattcacagatccacctacttctacttcttgtgtgctgggattgcaagtgtgtgccaccacatccagctttagttttttgttgttgtttgtttgtttgtttgtttgtttttagtttcatgtagcataggaatgacacaaatttgctaggtaggtaaggctagccttgcattcttgttgcttctgcttctgcttttcaaatactaagattacataggttagctgccatgtcaagacacagagtccaactgttggatagtaaactggctgatttgagactaaagaaagacaaaagcaaggaaatggacaagtgtataatcctatgactgggaaagggttaggggtgtgctcaatgcttatggacaagctgaaaagtagaatagggaaggagagtaaacttattctaggctctatgaatgatatcttcttccatatgcttatctaatgaaaatgcataaagaaaggaatttaagtattttagctgttctgatagctattactgctcataaatagtccagattctctccctgttatcttcttccctgtcagaggattgtgaattctgccttagtgaactcctaaatgaacctatgtgttagtcacactgctatgtaacatattattctaaaacctagatttgagaaaacaaattttatcagggcagtgatctcttgtttactggtgtattctactatcaagaatagtacctggcacttagtaagagctcagtggtgtttactgaatggtaaatcctgcttcctattttctcccattaatccagtctagtttgtctacagattttctgaatgtttttggttgagtctgatcagcacagcagttcctaagtaattctgacctcagaagttaaatgtgtctgttggctcctgttctcattgctgtgacagaatgtatgacagaaggaactaaagagagggagaggtaaccctggctcatggtttcagggcagatagtccattgtgtgtggggagtcatggaagacttcattgcagtgagtggaaggaaacaaatgagcttcagacaggacaggctttcagccaaggcctgttctcagcaacctactttagctagctggacacacccctgaaatgtcccacaacttccccaaacagctggggacaaagtgcccaagcatggagcctgggaggctcatttgtcattcaaagtgtatttataagctctaactgaactcttcagtaaatctactggatctggtcaatattttcatgataatcttctggttgtcactagttgcaagttgtaacagaaacttccacattctttttagatatctctctgctgtccttatatctatttttattctcccagggttgtgaaattatttgagtacttgtgcattttaacaagcaacttgatatcagataattaaaataaaagtaaggctgggtggtgacacatgcctttaatcccagctcttgggaggcagaggcagttggatctctgtgagttcgaggccagcctggtctacaaatcgagttccaggacaaccagaactgttacacagagaaaccctgtcttgaaaaaccaataaccaaaaaaaaaagaaagaaaagaaaagaaaagaaagaaagaaaaagtgagtattttaggcaacagagtagattcttgaggaaaatattgctagctagccatgtcacctagaagagacagtggcaacacttgtctgtctgacattcactagttcttagagacaacacaaagatgttgcaaatctgtccctgagctttatataggatactttaatgaaatacattctccatttattaaatatggttttacagagctaataaagaaacattaaaggcaaaccttttttatatccaataacactcaagagtgggatctgccttttctccccaaacaactgcttagttaaattgatttgtaaggagaacagagcctagagaagactgtgttctgtttactgacacccttagtaatgactacagcctgtggagaatttatggccatccttggagctgtaacaaggaatggaggaagataaaacaatatacaatgaagtcagtgtattagagtgagagaagaaaagactagaaatctaagatctgcagtctggtccctgctttgccgctacatgtgtggcatgagcaaattgcctgtcttgtccagatctcagtttctttataaggtgttaggtttagaatggatggctcagaaagtcttttacatattagtgtgaatgtgggcatgtgacagaggataactttcaggagctgcttccctccttccaccaaggattgaacttgggtcatctggcttgcacaaaaagtgctttttttttttttttaagaggactgtgtagcctgctgtgtagccctggcatggcctggaatttactatggttgtataaaccaggatgtcctttaactcaccaagatccatctgcttctgcctcctgagtgctgaaactgaagacatgagctaccatgccacatcaagtgcttttatctgttgagtcacctcactggatctctgtttgttattggtattattacataaatcactttattataatgaactctcaaacaaaagcatcacacggctagagtaaggtaagcactcacacaccaaactctgtccctctcagtgaacagctatacagtcccagtggccattctgaagcaatggagcttatatacacatctctggtatcagaaggtatgtggagatatgcctgattatcatctaaaatcttataatttctgggtctcttggggaaacacgtgcaacaaaaatggcatagctgtttccactatggtcagttttcctttctttcattcttttctttggttttcaaactattaatagcccactagcaaaattcctgagactctaaccagaagacaatgagagcaggctgttgaatatcactagacacccatcactccacttatttaattgactgttcattcattccctcagcaaacattctgcgtttcctatgtgcaagacacgaaacaaaatagaatacataatggctcttgtcccccaggggctcagcctctaataaacagaaaataaacacagataagtaacaaaccaaagaaaacaagacaaacaatataaataagatataaataaaagtaattaaacattcatggaacaaaaagaatatttcctaccgaggttatatggggtccttgacaggaggaaaagagaaattcaaaaggaactggttattttaaggggatttgttttgtttatctagtagaacgataacactattttaggaaaacaggaaccggaagaaaaaaaatgcttagaggaagctagagataaagaggccaagaggcggttatatacctggaagaaaaataaacactaccgggtgtgaagctcccccacaacctcagacctgaacaagccgaccagcactgaaagggcattggaatgcagtttagagaaggccatttgagagtcactccaaatgggtgtagtttgttctttagaatttcatcccaggcttcttaagggttttaccaatgagattgtagatttgctgttagtaacccccagggtagagacaagaaaacatggccacattttcacaccttaaaaagggctagcctggtaagtaatttgcattctgatcaatattctaaaatccagccatcatttatgagcaccaagagaaatgtgaactatagaaatgaaccaaagtgaagtaaagccagccacatgagataacctgcatttccttgattgctgtggctggggaagttggatgaaaaacatcctccagaacctggacaaaagtttttatgaagggcatgtacttggtcttaccacttcaacagctttttaaattaatgttggcaatatattcttctctcataaaatacatccctgccacagtttcccctccctctactcttcccagctccccaccccaccccatttccctctcccctagatccactcatcatccatctcccttcagaaaagagcaggcatccaagagacagtcaaacatgacaaaacaacatacaataaggcaaggcaaaagccctcacaccaaggctggacaaggcaacccaataggagaaaaagagttccaagagcagacaaaagagtcaaagacacatcactccacagttaggagtcccacaaaaacaccaagctaacagccacagcatacacatagagaacctggtgcagacccttgcagacaccatgcttgcctcttcagtctctgtgacctcatatgttccctgcttagttgactcagtggccatgctcccctggtgtcctccagcccctctgactcatacagtctttctgcttcctcttccatgagattccctgagctccaagaggagggacccaattgagaccttcaagtagactctctccggtaacatctgactgtgggcctctgcatccactctcatctgctgccagaggaagcctatctgatgatgactggacaaggcacccataatgtttgtctttctggatctgggttacctcactccagataatttttttctagttctatccatttgcctacagatttcatgatatcattttcttaaacagctgagtagtactccattgcatagatatgtaccacattttccttatccattctttggttgggggacatctaggttgtttccagtttctggctatcatgagtaaagccaaaatgaacatcagttgatcaagtacccttgtggtaggatggagtgtcctttgggtatatgtcccaatgtagtatagctgggtcttgaggtagattgattcccaattttctgaggaaccaccatattgatttccaaagtagatatacaagtttgcactcccaccagcagtgcaggagtgttctccttgttccacatcctcgccagcatgagctgtcacttgtgttactgatctcagccattctgataggtgtaagatggaatctcaaagtatttttgatttgcatttccctgatggctaagtttgttgaacattttgttaagtttgttaagtatttctcagccatttgagattcttctattgacaattttctgtttagatctgtaccccatttttcctctttaattattctgtgtcttttataccatgtatcttgatcccattcatttccccatccctttgcatccaccctctgcctctgcatcccccccccaaaaaaaaaaataaagaaaacaaaatttaagagaaaaatgaaagctgcagcgtgacatagaagccatagtgtgacacaggtctggttccaggcctctggtttctactacactatcaatgctggccctcactgggcatcttcttggacatcctattgttgtcctgtgttgtggagatcctgcagctttgggtctgtgagtcaggtcctttcacttgttccagtagatcgcagatggggtggatgttgggacagcccaagtcctaaccctgggttctgggcctgggcagctgcagggttggtctgaccaccagttctcccctggcctcaccaccaggttgggctctccagcattgttctggctgattcactttttttagaaatgagtgaggggtggagccagttctcctgcttttatatcctcagggttagctctgccacacctatctatactgtgttgccctggcgaggtacaggatctatgctccagagtgctgcagctggtgaggtgctgaacaaccctctgttcttatggtcccatggccagctcctccacctgttgcaggcactgatggtcagagggtgggggtgagggaaaggttgctcacaacatcgggcctgggtcaccatctggccagctctgttgcctaggcaaggggcagggcccgctttcctgagtgctgcagctggtaaggtggaggatcagctctcttatctgttgcaggcagtaagaggcaagggggagtgcaattttcccttacccataccgccacatgacagacaggtactgggaaaggctgacccatgcttacaactttggggctcactcacacctccaccgcaggttgactctattgtgttacccaggtgaagttcagggcctgctctcccaagtgttacagctggtggagagtagggacagttctgctcttgtgacctcagggcctgttctcccacctgcctcagtctttgatgggtgggagagaaagggcatctctccccagtccatgccgccgtttggcagatgagaggtggggccaggtctcctgtaatcactactttcggggctgactcatccacacctctgtcaacagggttggctccatagtgttgtccaggtgcagtgccaggcgtgtgctcccaagtgttgcaactgatgagggtcagggacagctctccagtatagactgagttttcctctcctggcagccactcccaaataaccaacatagagacttaatatcaattataaatgctcagctgatagcttaggcttgtctccagccagctcttacaacttaacccacttagattcatctacattctgccacatagcattacctctctttcatattgtacctcctgtttcctctccatgtctggctggtgactcctcagactctgcccttcttcttcccagaattctctctgcccccaaaattctgccttgatatcagccaatcagctttttattaacagcatgagcaacacatttttacaatgtacaaaagaattattccacaacactccagttcttatgcccacaggagcagctttcccgttgcctcaggcattgatgggtatggggaggttgtacccatttttaattggatgatttggggggtttttgatatctagtttcttgagttgattaatcttctatctgctgtggagatggtaaaaatctttccccattttataggctgccatattgtctgaatgacagtgtcctttgccttacagaaggttttcagttctatgaggacacatttattagttgttgatcttagtgcctgtgctattggggttctgttcagaaaatcatcacccgtggcaatgagtttaaggctattcctcactttatcttctatcaggttcagtgtttctagttttttttttcttattaaaaattatttttattagttcaagttagggaacaagcttgtttcacatgtaccttccccatgtgtccagggccagagtgtatcccttcacgtgggatgggctctcaaagtcccttcttacaccagggaaaaatgctaatccacttccagaggctccctggagtgcagaggcctccttattggcatccatgttcaggggtctggatcagtcttgtactggcctccccgacagcatctggggtcgatgtgctctcccttgttcaggccaactgtttctgtgggtttctccaacctggtacagaccccttcaatcttcattcctccctctcttcaactaagttccagatttcagctcagtgtatatctgtggatgtctgtctctgcttccatcagccactggatgagggctctagttcctggtcagtcggcggcggaatccagtgtttctagttttacagcatcttttgttaacaaatcagagaagccaatataacctatgcctcagaaataatttattgctcaaaagtagaagacatatctaaaatagtgagtagcagaacaggaaaaaatgtcttcagtagtgtgatacaactgtgatgaaaagaaaaaagattgtgaaatacattgtaacattcaagaacccatttgaagtgtaatgtttaactacttaatctctttgagccattctcctatttatagtatggagataactgtagtgactaatggtagaaaaataggatcatgtattaaggaactagcaagagagctaggaagaggtcttgttcatagcaggagagttaggtagatgtctcagttaattgctttcagtgcaagtaagaggacccgcgttcatttccaggcacccacatggcccttcataactatctgtaactccagttccaggggacccaacaccctcacacagacatacatgcaggcaaaacaccaatgcacataaaataaaataaataaattagctgggcagtggtgttgcacgcctttaatcccagcacttgggaggcagaagcaggtggatctctgtgactttgaggccagcctggtctacagaatgagttccaggacagcctccaaagctacagagaaaccctatcatgaaaaaccaaaattaattaattaggtgcaaataaataaataaaaatgaaacaaggagcttagctatagtaactgttgtctgtggtaagcagaagaaataggaggactagagacaacaggctcatgccactgtgccgaaatttgtgcagtgttggagactgaacccagggctctgttcagcctagtcaaacattccagcaactgagctccatccccagccctgctaagtattgcttacgaattgtctcatgtcgtttcctcttacccagatcacagaggctcttgcttatcaggcttcatcttccttggtataattttctttgtttaatgaccacaaattatattgttcatactaataagaacatgaatagaagtaagcataggaattcaaatgtctaaatctatgccccagatttacttttcctgtactttgaataaattttttccttttataaaaaatataaatcatttaagaagttctttctttggggagaaaatagatcgttttgttttcatgttattgtttagctccaacttactcataaatttaacaatgaaaatagaattttcctggagccaataaagtctcctgtcattccagaaaagtggagggaattataagaacatataatgagaaacattttcctgatattaacaatcaataaatctcaggatcatttatttggtgcccaattagtagcagaacaataacaaggggtctgggaagtttcagaggcaaagatggagttggtgattttcaagtacacacagtttaatagggactgagttatccttagcaagtacgctgggagaacatgtgcagttgagaaggaggtagccagagcagctctttttagacattgttcaccgcaattagcttctggggtgaacagaggaaatgggagagacagagaaaatagtagagttgaagtcacagagccaggaagtggtgggaaggagatttaaacgtagatttttctaggtccatatgtaagatagtctcatgacattctcttgaggaaaacatctcacagatggttcaaaatatctccgatgttaattgaatagacattttaaaaagttgtgtttctaattcaaataaaaaagttggaaaaaaaagaaataaaaaatccatatgcaatatctcctttgcatttgtgaacacatatgtacccacacacatgctccaaataaaacttttaaataaagcctgtttaaaaaaaaaaaagtcaggtactgtgactgagtagaaataaagcaaacaacaacaaaaaccttctagtcccgccccccccccaatttggggactggtaggacttctgaaaccccaagctcaccatgatgcctcaaagaaaatggcttaaatagttgggattttctcatcctcagacaactctctaatattcttcctgaagttctctgtaaaggacacttacgaagggctggagcaatgcctttgctactttttcagacaatctgagttcagttcccagcacccacagaaaaaggacacaattcccttctacctccagacagagacataaatatacatataacattaacaaaagtgaaaagaaagctcatgttactctatattgtaggtctggtagatactaaatttctctaatgtttattgagataattcttgcaaatattttttaaaatgtatgtgggactatgatgaagctgcaataaaaattactggagtatattttaacacacacacaaacacaaatccatgaaacacacatgcagactttaaaggtgagggaacagtgtcctccccaaagcctgaaacaccctgtgagacctttttactttcttctctcatgtttgccagctttttcccagataaaaccatttgccaccattttgtatagacattttaagcatttagggctgccatccatcttgaattgaatgttgtatatggggcataggtatctttcccacagacacccagttgttgaagcatggattattaaataagctttcttttcctcatgggactgatgaggaagctggttcataatcactcaactgcatacgtgtgtctaactacgaacttgatcctgttctgttagtctatttacttgtgtagccagtaataaatcttgaactcagagagggtattctttgctgttttggttgctcagtgttctttgcatttccatataaattttagagccacacactgtcaacatcttaaaaagaacctactgagctctgcagatgatatgaaattctagatcatggaagctgtccccagagagaacttacttgtgtttctaccacttgaagaggtctgagaaactcaaagttgagcttgtgagagcgggtctactgcagtcatcctaatgcccagggtggagccagttctagtaactatggattcctggtcatttgcatagcccttcatcttctcagcctctttctggaggtatctgtcttgatggtcaggccaggacatgcccagagatttttgtgagtttataactgtcaattaccttcagggtgaagggtccccaaacattagcctcacctttcttggcttcacttgtcttctagatcttgaactagcaatcttcactgatttggtagctcctccttgatgtttaaaaactataatttgtccaacttttctaattgttctcagcaagaggtttttctgaaacagcctaattagccaggatttgctgaaaatggcaccatagcatacatttcttaaaactttaagttcattaaagttaactttgttttggaaaaatatgttcagacttccctaatgattctggaaagaactggaaattcctcagaggagtgggtattgctagcatggaagtttggttttagtattgttaaggagaaaaactaccacagaccctcaaattagagagaaagagaccacagcagaacatggtcttgggagctgcccaccaaggctactctgtgtgcctcctggatttactgctccctctccaccatttcaccctcaaagagaggctgggaaaatatcccccttgctcgttacacccatccagtcccactgaggcaaagcggcgtcatccactcatcaattttgattactgagctgtagccacatgtgggttttacaggctccaaacatgtccatattacatgtctaatgtatctagacataaactcaaagctcctaagaaatgggtcatataagatcaggaggctaaaccttatgttcaagtagacagtgttatataaccctattgaatgttgtacagaaagaagtgacccagatgacactttagaaagaacagaaccaagaaataagacccaacttttaatgatccttattatgaaccacatatgatgctaaggcgtcattaaagataattacactcatttattttatgggcaataggggatgtgtgctttctctactatgttggtcccagggactaactcagactatgacttaacagagagcatcttgtcttagttagggcttctattgctgtgaagagacaccatgaccacagcaagtcttataaaggaaagcatttaattggggctgacttacaggttcagcactttagtccattgtcatcatggcaagaagcgtagtggcacacagacagacatggtgatggagaaggacctgagagttctacatccagattggcaggcatcaggaagagagagtgagacactggacctggcttgaacttctgaaaccccacaacccaccctgagtgacacactttctccaacaaggacataccttctaatagtgctactccctaatgaccaagcattcaaatatatgagcctgtgggagccattcctcttcagaccaccacacacctttacccactgaaccatcttgctagccgtaaggcagcttataaaggcagagaatttctaagatctgaagagaaagcagggtagagggcaccttatatttagtcacatgttcagtcctcataatgattgtctttttttttttttttttttttttttttggaacaggctctttgtgtgtagcgcaggccagctctggttacaatcctcctgcctcagcctcccaaatacccattctaaatttaaaaaccatagcaaaggtctcagagctggtgtcttgcagtccaaagatttgaatccagttcttccagatcccaagcctctttgaaagtgtgaaagagaaggaaaggatcttatttaaatgaaatcctattacagtcccgggacagaggtatagtcatgcatggtgtttgtttatagtttccccttcacgggctcatcagcattatttactgtgaacaacagtctgctgaacacttaaccaaatcttccattctgaggttttcaccagtgagggccaggttgtcacagttcatgagagccataaacactagcattcaataactttttccatcacttacacattcacaatacaaagaagagatgtgtaaaatacagttcctattattcaaatctttcttttctttttcaagacaaggtttctctgtgtagccctggatatcctggaactcactttgtagatcaagctggccttgaactcacagagattcttctgcctctgcctcctgagtgctgggattaaatgcattcacagcattttttttccccaaaaagatccttcaatctagacatttggcaattgtttatctatcatgcacacaaaatttttattcctgtaaaaggtaggaagaatataaaataagtaagcctggaccttaccccatgaaactgtgcaaaggtgaattgggctcataaatggatattctcattataagagcatagggccagtgggatggctcagcaggtaaagacactgtggcacaagcctggacaactgatgtaaggctggaagagaggagtgactccacaagactgtcccctaacctctacaaactttgtagtacatgtgccccccattatatgatgcacatacacaaaaatattttttaaaaaatctttaagtaaccacagtatgatagttaatgtggatttttggcttgacaggatgtagaaggccctaggagacaagcctgtggcatgtctgtgatgagtgtctcaattaggttaactgaggtggaaggctcactaagtgcaggtggcagtagcccgcagactgatggcctacaccgaatacgaagaagacagaagctaagcgaaatctccctcctttctgtggatacaatgagactgacggcctctgtggccaccatatgaaccaaaaggagcccttcctccctaagtgcttgtgtcaggcatttgtcacagcgatgagaatagtaactaaggcacacagggtatcacagaaactagaaggggaccaaggaagcaggagcaaaccacccctaggccaacatggggaggcagtgtgcctggcaggaaacactaacatcagtttgggatggaaccacatgatacagcactacagaaagtccaatggtgtgctgagacagagctgggccaggaatacttgcagtgactgtagtcgggccaccaacctttcttctcttgccctggctttgcagctcccaaagctcttctcttttgtgagtttgttttgggttgttgaggggaagggaagttatctgttattttctatcttttaaaaatatgtgtgtatgtattacgtatgtatgtgaagggtgtgtgtgtgtgtgtgtgtgtgtgtgtgtgtgtgtgtgtgtgtgcatttgtatgtatcaatacagtgcacacttgccacagcatgtacttgaggccagaggacaacctcaggtgttggtcctcgcctccacctgttcgagacagggtctctttgttgttccttgtgtataacaaggtagctggtccacgaacttgcatgggttctgtctccgcctcccatctcaattgtaagagcactgggattacaggttccagcaaccacactggctttgctggagagtctaattcaggttcttacacctgcacaacaaatgcctcacccactgagctgtcacccagcccctcctccttccctttatatcttttccttcccactccccgccagtccagcggttgaggaaatgggtaaccttaaagcagactgtgaggcttgaaggagctgtggggatggaaactgttgtctcagttggccgcaatcttgtctttgccactctgtagggacactgaagtacatctacccctaagttgaaatcaacaggacatgtctgcaggcagtaaatgctcagtccatatgtacatttgtgggaaataaatccagtaacaaaacagaataatagatgataaaggacttggaaaacagagacatttagatttatgactgttctttaaattatttattttatgtatagatgtgtgtacctgagtgtatgtatgcatatgttctgaatgcatataggagcccaagcagtccaagctttgattccaagtacccacaatgcactcttgttccgggagatcccacactctcttctgatctccagtggctcctgcacgcatgggtaggcatgtacacatgcctgcaaaaacactcatacatatcaaaaattctattagcatttttgtttatttatttattttgtgtatggggcatggttcttgtgggtcagggtacacaagtggagaccaaagaactcctttcaagaatcggtcttctccttttacatgtgggttctgggaatcaaactgaggtcatcaggcttggcggcaaatacctttacctgctaagccacctcactggctcccttgaagcacctttttcaaaaccaggtatgaagctcaactcagaaccactgcttagtgggcagtgtctatcagattgtgcaaccctgaacactagagagagaaacagtgcatatgttaaaagcagctggtggagggcacccaggaatgtttggcaagctctgaagtgatggcaatgaaaaaggtactccagagaccctcccaaaacatccagggaaaggtgagttgcctcaggggttgctctgactggtgggacttgtgtcaggatcccagtggcctcaccctacccagcctgtgactgccagactcctcctgtctgccatcaaaccattcagccccagcagctctcatgttccaggagaacagttcacacagactcactgagtactcgtgagccatttagactccagagagttcatgaaaatgatcctaacagcaatgaatcagaaacattcatacctcttcttaaatgaccctgtggggctggagtgaagagggacgggactgcccagatgcagaggcctaagcagaatgggcttcctggcaagcaaagctccagagaggtctcctgggatagtcccaccaggacctctgaggcaactctaatgagatgatttagcagtgtggtggaccggcctccatgcctcccacactgacctaatcccagttgaaattgcacaagggtgagctgacaaactctggttacacaaagcaagggctaacattcgaggcttgggaaacctgtccaagacatttttttccctttctttaaaatttttatagttaattttatgccccataagccagtggagctttttatttcgtgctagcaactgtatggtgctcaaccttctttgtagattggagctgagctcctttttttctccttatgccctcttcagccctggcattcctctgtttgttatgtaggacagtcctcatgtcagtgagtccatctttagatgtcatggttctatggacctactctagttcatttatgtaccatgcaattagggttactgcagttctacagttctcactggcttctgataaggtgtgcttgctatcttactatcattcttttaaaagtatccctggttcttctcacagcttctctcaagttagctctagagacagttttcaaaagaatcaaaatgatgcctggtgtcgtgctgtgcagctgtaaggccaaggcagggggattgaaagtccaacagtagcctgagctatgtggtgagaccctgcaaagacagaaagcaagggctggggagacggctcagtgatttaaatgtttctgatacaagtataatctccagaaccatttagatagcttgttttagttcccctactcaacttcattaacaagaaggataatcaagacatttactacccatctaccaagagcattcactgccagatacttagaaaccctcacaaccctgaattctgccctagagagccatagccacggctttccacaaatcatgtctctgtcaatatcttatctgcccaattcttggatccaatgggagagagtaaaggacccagaaacaaaaatgtgtagctactaccatgtgattcccagcaaaggtgccaaaagcacaaactggaaaaagacaacaagaaatgttaggaaagctggatacccacgagtagaagactgaaactacatccgtatctcaccttgcaagaaaatgagtccagtatggatcaagggccttaacagaacacctgaaagtttgaaagtgttcaaggaaaacattaaggaatctagacagaggtgatgactttcttcatagatctccaatagcttagaaagcagcaagaattgacaaagggggtcacatttaaaaattaaaaacaacactagaaacaattaccacaatgaaaagatagcccagcagggcaaggtagtacatgcctgcaatcctagaacttgagaggtggagtcgggaagaatgtgagactcagtccagcttgggttgtacaagatcttgtagaaaaaaaggaaaaagagggaggaggataatgagaaaaagagaaagataagaagtcttcagaatgggagaaaacctttgactaaggaataagacccagaatatataagaaattcaaagacttaaaatcaaaagggcaaataatcctaccagcaaatcggcacatgaaactgcccgattctcaaaaaaaaaggacagatggcatgaaaaggaatttcaacatcttttgtcatcagtgtatcaaaactacactgagattctatatcccccagttagatttacaattgccaaagaggaggtgtaaaaaaacctcaagcaacagccaggtgtaacgacacaaaaatcccagcacttgggatatagaggcaggatcaggagttcaaggtcatccacagctacaatagtgaattctcatgagcctgagctacaggagatcctttctttaaaaaagaaaaaaaaaacttttgaggatgggcagtggtggcacatgcctttaatcccagcagagaggcagaggcaagcagatccatgtgagttcaaggccagcctggtctacaaaaagagttccaggacagccagaactgttacacagaaaaaagtagtagtataccactctggaagtcagaatgaagattcctcataaaactaaaattagaactcccctaagattcacctggaccactcctggatgtacacctgaaggaaccaaagtcagcttcctgtagtgatatgtgcacacccacatatcactggattattgcggtgtttattgcggcattattcagaaatgcaaagtcatacaatcagcctaaatgcccataaacagatgaatgaagaaagaaaataaggaatgttacgctgccataagaaagaagaaaattatgttttctgtaggaaaatgggtagaactggagatcatgttaagcaaaataagtcagacacagagagatgagtatcacatgttttctcatgttgtgtgatatccaacagagaagactgcttagacaagggtttaagccaatagaaaatcttcattacctgggtgtttgggatcctagtatagcactaattggtgagtttttaaacacaaaaaccatgttctgggttgacatacttcagttaacaagaataactagcaagaagtagaacaactacagataccaaaaagcaaggttagtacatttagaggcattcccagaactttggattttgatggattaggtctttgttttagtgttggcaggtggtactgtctttgtgctgagtttgacagcctgaatggtacttccatcatggagtcagttgtgctaaggtctcaggatctactaagtctggggccctgttacagtatccaatccatttgagtgctgaaagggtcatgtggatggtccaggaggatatgcttcatgcagtagattacattatagggaaggagcttgggaaacctgccagtttataataagcactgaagcaaacctggtttttatcccaaagagtaacaataccacaccactcaagcttgctcacagcaaacaagcacagtcctgaaaatgaccaggatagatggtagtcagtccttcgtactcttggcacactaagccagataacactggaagaatgtctcacaacaatatattaatgaaataagtgcaaaatgggtgcagtcactctgaaaattgtcagttacctagatatgctttgtatacgacccagccattcttctcctatgtatctacctaagagaaatgaaagtatatatctatacaaagtctcttacatgaatattaatagcagttggaggatgaaaggagagagaggaggaaggaaggggaatacctcaataaaaaaatagcactttatttgtaacagctaaaaattaaaaatttctgtgaatagtatatggatgaacaaatgtaatatccatgcaggagattactactcggccataaaatgtaatggatgttgacatatgcaacaacacagaaagactatatatgctaggcaagcactctactactgagtatgtccccagctctttaaaaaaaaaaattagtcccagtgtggtggcacacacctttaacaccagcacttagaaggctgaggcaaatggatctctgtgagttcaaggttagtctggtttacataatgagttctaggccagtcaggacaaagaaagaaaaaaagaaaactttttaaaagacagacaggagctgggcatgaaacactcttttaatatgaggaagtgggcagaggcagatggatctcttgaattcaagaccaaccccagtctacatacagagcaagatccaggacagccaggactacacagagaaaccctgccttgaaaaaaaccaaaaataaataaataaaaataatgatagctggggaacctggggcatgaggacttggctcatttgctaccttattcactgaggtcataactgaattctactgattcccaagcataaattctgagtctctcaatatactacactattccccacctatattatgatgttccccctctttttttttaagggcatatgtggtgcattgcataggaagcaaatttagaagaaaatacattcaaatgatcatatgttttgtggttagttatagatatccaatttctagaaatcaatctctctccttgactcttgtgtgttttaaaaatgaacatatataatattttagttgttctaagcaaaaagaaactcactttgtggactaaaaagtaaagtattgaacttctctgattatgaaatactgtttatgagaaaaatctcagggatgctgcctaagtttgaacccagctctatcaattttccacctgtaaaattctggagctctctaaattccagttccctcctctgtaaatagctagcatctagagctagtgtggaggctgagtgaggcaatgcacaaagagggtttatcacaaagctggatggacatatagtgaactaccaattgatattaattatattatcatcattgttctgagtttgacagccagttgtctgacattgattttttaacaaattagaacatcatcttaaacacaggatctacttagttattagagaaaaccttgtatttacagtaggttggaaaaaaaactttttgtgaacaaaatcaaaaagtcagacacatagcccagctcaagaatctcagcacttgggtggtggaaacaggaggatgagtgcaaggtcagcctataccacatgagatcctgtctcaaaacaaataagcaaaaacaaaagaatcagttcaatatgaaataacatattgtaggaaggaatgctggaggactgttctgcccactataatttctgatcagtgcaatttaaattaaattaagtgaaaataattttaattaaattaaaattgctgatctaaaactttttaaacacgagtacaataacataaagaaggaaagatttaagaggactagtgtgagtcttcaccccaccacaattatgtgtgacgatggcaagagcccctcaattccctggatctgttccctattccattcaaactaaagggttgaacaaaaccaacttggaagacttctcaattcttaaacccaataattctcacatcacatatttactcatctttcactggccattaattcccattttagggccaggccctacactaggacctggagaatcaacataattaaatgtctcagctcctgttatgaagcatacactctaaaaaggaaatacaagttgcgccgtgtgtgagtgcgtgcgtgcgtgcgtgcgtgcgtgcgtgcgtgcgtgtgtgtnnnnnnnnnnnnnnnnnnnnnnnnnnnnnnnnngcctgtgtgtgtgtgtgtgtgtgtgtgtgtgtgtgtgtgtgtgcatgaggggaagagggagccctcaccagtgctaagatgtattaaagcagcaactagacaagcactacttatggcctatctgtcccaacctatagctaagtattcaagtaataaacagtagcattgaaccacaccacaccacccttgaacatctccaaaaagtacacaagtttagaagacccatgaaaagtccagtggcagtgtgttcctattaattaggcattgctaaatctttcagcaatttatgagccagttaggtctataaaaacaaggaaatggctgtggtgggataatctgtcatattgtgcctcaaatagatggccccttactccagcagtcctgcgatggcatgaaccttttcctaagcgttttcttctcattattgaaaacagatgctttcttatactctcagattcaactcaaaccctgtgaaactccaggttgtagaattctaaggtgggtcccccaagatctcatccattgtttttagacaaaatgaggcctctggggttcatggcctcaggggagatggagcagaaatgaagctaggacttggggcagagctggagtcctgggattggtgctgactgcccgctggacagctggagggcctacatcttgaccctgactcatgaagtgactcatcatgccaatcatctctgccactctctgcagttgaaatgtttgcctgactcttcctggaagaaagatgagctcaaaaaggaagaaaggaggaaggaaggaagggaggaaggaaggaaggaaggaaggaaggaaggaaggannnnnnnnnnnnnnnnnnnnnnnnnnnnnnnnnnnnnnnnnnnnnnnnnnnnnnnnnnnnnnnnnnnnnnnnnnnnnnnnnnnnnnnnnnnnnnnnnnnnnnnnnnnnnnnnnnnnnnnnnnnnnnnnnnnnnnnnnnnnnnnnnnnnnnnnnnnnnnnnnnnnnnnnnnnnnnnnnnnnnnnnnnnnnnnnnnnnnaggcagaggcaggaggatctctgtgagttcgagaccagcctggtctacaagagctagttccaggacagcctctaaagccacagagaaaccctgtctcaaaaaacaaacaaacaaaaagcatattgtattttactttagctttttcattcatcaaacttaacacctactaaaccaagagtaatatgagataataccctgacatgttattgttttttaaataacaattaatagagttgttgtgaaaaatttcagacctccactaatgatcagcagccaagccccagactacaggagggcaagatggtttatgaactctacaagcagctagatgcagtagtacacacctttaatcccagcacttgggaggcacaggaggtggagctcaagttcaagactatttggtctacgtaaaagaattccagagcaatcagggctacacaatgagatattgctttaaaaaacaaaacttcaagcattgaagtatgaatatgtgccaaagcagacagtgaagagtctatatgcaagtatatcaattgattctaaggagtctaacaaaagggtacttggcaactcaagaagaatatagtcatcctggggaggtggtcttagtacagttagataccaaaggttcttagcatcagaagaaatcatttcttccactgccatgagttttcaataacctcagagttgctggaaaccatgagaacaatctctgggattgacagtcgtgtcaaacaagaaacagacctctgtgcaaaaaagctgggcacggtggtgcacacctcacaaggtggaggcaggtggatctctctgagttagaggccagcctgatctacagagtgagttctaggacagccagggcaacacagagaaacccaatcttgaaaaacaaaacaataacaacaacaacaaccccccccaaaaaaaaccctagatttaaagtcataggggtactgagcttgccacacaatttctggagcaggtgtttgtggccccagtgactttttattcccatggcctcagtattcccaatcatctggctgggatccttttgctctgcccaggtaaacaagctctgtaagagttggccttaggtctgggtgtgctttacggacaagtgcacagcaatgactcgcagagcatagcaaccaccctgggattggtcaacaaccagttgaccaatcaacacagggcaaaccctccaagcctggagccccaccaatcctgagcctgtgcgtacccctagacactccccttacacggcccgataagatctctatgcagtcacttcgaactgtctttcctagccatctgccatgggtggatgaaagacccgagctaacatgggttaacttgttaaacaactataataaagtctcatgcagtttgcaaaaaaaaaaaaagagttggccttagggctctactgtttccactgcagcagtaagcaggtaggaactgcagcagggccgaaccccacataccagagttctccagcaggcctcagacccatactcttgcctacattacagctcctgtataggtctaggaagctaacagtccctagctcttagcactagtaagtgttaaagctcttggcctgggatctgatggccccaaagatgtggcaaagcttctggtggccaggacctacagtttctcttctctggttccttacgtcgtggctccccagcttctctctgcttctgttgcccttccttcctcggctgctactgaaccattcagctgcttcttcagctgtcaagcagctggctgctgtgttactgactgctcagctgtcactgccactgcccgttctgtcaccaccctcattgtgtccttgtctcttctttctctgtgttatagaagaagaaaggagcactggaggggagttttttgttattgttgttgttgttttgggtttgtttttttggtcctaatgatacaataggagaagcagctcaggagagcgtctctcagacactcactaagtgagcctggatggtgcacttctatagccggagaagaggcctttggatcaacagataaattttagcagatttttaagtgcctagcagtggcccagtgccccacggagaagtgggtctctcttatctgtctcatcaggactcaagtccaatgttacagaaataactataatttgtataatacatcttcagattttttttaaacttttaaatcagatttgttaacttaattttatgtgagtgttttgctttcgtgtacaggtctgtgcaccatgtggttgctttgtgcttcaggaggccaaaagacaacatcagatcccctggaactggagttacagatggctatgagccaccatatgggtgctgggaattgaacctggctcctcttaaagagcagtcagtactcttaaccactgagccatctccccagtccatgccttcacaaggctttatgactttgctgtaaggatcctaaaccttaccgtgctccaggtgtctttgaggtgcttgctttagctgcaggatccatcacctggtagatgtagagcctagacaacaacacattctacaatgcttgcctccacaccatgccaccagtgcaaactcagagtggagagaactgctattcagtgtttgagggtataacagcctttgtatcttattttgaagtgccttgaacttgacatcataaagtcattaagcaaatttcaaatacatgaaagatgataaatgctgggcttggtaggggcagaaggaatgtaagctcattggctacaagagtgagttcaaggctagcagggacaactaaataaaaccctgtcctaaaatgaaaagtaaagagagggcttgggatgtagctcagtcatagagctcttgcctaatatgttcaagagctggagtgctatccacactatcaggggacaaaatgctgataaagtcttggggacatcagggctacagagatggctcagcggtggagtgcttgctactcttccaggagaccagggtttggttcccagcacccaggtcaggaggctcacaaccacttgtaactctaaatcccatagctccaacactctcctctggcgtcctctggcacttccattcataaacacacacacacacacacacacacacacacacacacacataattaaagataaaatgttttttaaacctttgggaaaatcatgtttcagtataatatactctatgataaagtaaattctgttcagatttactttaggctttgggtccagctagatagtgaatatttaggatatagaaataaatcaccttcacatctctctcctcagtacttaacataatgcctgtgaacagtagaatttatgtaaatgggttacccagattttatgctgtttacaacatttgtaaatcatactgtggtaattaggtttgctttattatccccagagatggcttggggctaggattggtctctgtttcttaacttctgatgcctttactcttgcaaaaccaaaatttattattctgttgctgttctggttaaaattattcattatagttcttgactttttccagtgcatagttgacatttgatataaagttgctatgttgcatcatgatgtttgttttaaaaataataaaactttcttttttactatcaagataaaaaaatactctgtcaattacaagacaatcagggtactgagacctctgttatgggagtgccatctggggcaaggcactagccaattacagtgtactctaagctgcctttaatattatgccaccctctctagaattccttctgtgttttatacctctgggccatgccccttgctcccctatgccactgcctaaacctgccttcaagttatactcccatcctttccctcatctcattgctatcatcaacccaatatgagtctcactctttcaaatctataggacctctataaaattcagaatttattcaaactttaaagtctctagcatttagctaagttactaaattaccaatacttctctcttacagcctgtccaagccatgcttcagcctctgttttcataccttcaatactggggtgggaaggtgggcactgagtgagttcaaggccagcctgaacaactaaataagaccctgtcttaaaatgaaaaacaaagggagagtttggggtataattcaacagtagagctcttgcctagtatatttgatatctggagtgtaatccacaaaaccagggagcagaatgctgatggctcagcagtggagtgtttgctcctctttccaaaggaccaggctccctgaacagcccagcccatcttgggacagttttttttttatcataaattccttctgtatactgtaaattctctttccttggagatgtattaggaacgtggtaaataaggcaaatttctaccactgctgatggtgagaactttgacgtctggcatcccaactactggtaagaatataagggagcatcaatttcacacacctctgtggggttcaaagttactaaaagtgctttaggagagcaatttggttatatctaataaagtttaaagcatatgcttaccttccatttctggcagcactccaaattagtaaatatccagggcatgaacttaagagaaataatagaataagcacaaagaaagaaaaaattaatataaaaggagtcaattaataaaaagaaaggcaaataagccatagaggagattgacaaagtcagaaactgatgttttaaaaatgtctctaatgcaattaagttaagagagagaacacaaggctctggatgctgtgcagcagcaggtgagcgcttgcccagtgtgcaccgggcctggtcctgtccccagcaccacatggtaactgttctaatttgctttcttgctgctgtggtaaacactatgactaaaagaaacatggggacagaaagggtttacttggacttacagctttcaggtctccatcattgagggaagtcagggtgggaactcaaacaaaaactaaacagaaactgcagaggaatgcctgcttggtgattgcttcctctgtttcatgctcaggtaacagtgtcacccacagtgggcgggctggactcgcccacatcagtcaccggccaggtcggtgccccatagacctgcttgcacaccaatctagtcaagaaaagaaaagctttctgccgggcgttggtgatgcacacctttaattccagcactcaggaggcagaggcagacggattctgtgagttcaaggccagcctggtctccagagccagtgccaggacaggctccaaagctacacagagaaaccctgtctcgaaaannnnnnnnnnnnnnnnnnnnnnnnnnnnnnnnnnnnnnnnnnnttccattgggattctctcttcccagagacaaaaaactaaccagaagattggcgcaggcctgtaattctagcactagagatgaaggtaagagggccagaagttgaagagaatctgaggccagtctgggatacatgagattctgcgggggaggggaacaaaaaataaatataaccatcacatctgtaatccaagcacaggccagccagtgggttctagaatggcttgggtcacagaatgagaccctgtttcacaaaaccaaaaatcaaacaaacaaaaacctcttgcccgatgcgtgttaccttttgctgccagaaatcctatggcaggtaataaggaggttaagtaagaccagtgcaaacaatctcaggccaacacatttggaaggagtccaaatagaaagaagaatgaagaaccttaaattgttttatgacaataaaatagagtaagaggataaaatatcttactatattctaaacaatgcactctgatcagcctagattgatagtcctactaaaatttcaggaaagaaaaaatcttacatacatatacaatctttacatatacaacatataatatacaatatattcataaacactgtttccggggcctggggggagaatgtaaagaaaagacagggactgctgaggtggctcagcctataggaaagagtgctgctcttgcagagcacccacacagggcagctcacagcctcctattacttcagccccagaggtagcagacactcagagggaacctgcactcatgtacacatgcccacacacagacacataattggatttaaaaaatctctttaaggagggacaagcctaggaaatcagcttggtggtgaagggcttaccttgcctccaacaaagccctgagttccatcccaatcatgaagtgagggacatttagctcattttatgaaggtcacataactttgagaccataataacaaaaatagtaaaataaaggaaaccatgtgttgtttccactcatgagtagatgaaattattttgaatattagacaatgagatctatcaatctataagacaacattacactcttgagtttgtattaggaatgcaacatatgtttagtaaaggaaatcaaattactctaattcacattaacagattaaaggaaaacaatcacatgactgtaccaactgaaaaagaaaaatataacatccatttgtgattcattttgtttttgtttttgtttttttagacagggcttctctgtgtagccctggctatcctggaactcactctgtagaccaggctggcctcaaactcagagatttgcctgcctctgcctcccaagtgctgtgattaaaggcactggccaccacaactcagccatttttttacatttatttgtgtgttcgtgtgtgtgtgtgtgtgtgtgtgtgtgtgtgtgtgtgtgtatgtacactcgaaggagtgtgtcatgacatggatggggatgtcagaggacaactagtaggagtcagttttctcctcctaccatgtgggttgaggaatcaaactcaagatgtcaggctcggtaacaagtgccttttcccactgagtcaatctctctggcccccattcgagattttttttttttttttttttttnnnnnnnnnnnnnnnnnnnnnnnnnnnnnnnnnnnnnnnnnnnnnnnnnnnnnnnnnnnnnnnnnnnnnnnnnnnnnnnnnnnnnnnnnnnnnnnnnnnnnnnnnnnnnnnnnnnnnnnnnnnnnnnnnngtttagggcaagcacgtgttgggctgttatggctgccgaaaggggagttggtcccttcacaagttaggcaggactaggggtcaaagaggattctgggaaatgtagtagagaagtggtgatccaggcaggaagtgacatagcaaggagactcatatttgagcgaggagaaacaggaaatgccctccttttccccttcctcctccagcggcaccatgtgagccacaggcaagagagggtgccagcgaaaggcatcctctataaagataagttttataacatatatagatttatgataattaagactgagctagcagatgagaatcctagtcattggccaagcagctttgaacctaatacaagtctctctgtgcattaatttgggccttaactcaggcgggaggctggcttaaagcgcacacgtggtggtggggctctgcggcttttggcagaaagatttaccgtaacacatggagtttgtagatagatttttctttggaacgacagctcacaaaaaacaacatgggaacttattattagttataaaagctcagcttatagcttaggtttgttccactaactcttataccttaacccatttctattcatatacatattgccacgggacttatgacttttacctctccttctatatgccttgttccctctgcatccagctggcaactccacctttcttcttcccagagctctctctgttcagaagtctctgctatacctcctgccttgctattggccagttagctttttattaaatcaatcacagtgacacatcttcacacagtgtaaaggaatattccacaactcttaatctgcattttttattatcctaaaaagtttgtaaaaataactttcaaggattagaaatttacattacattgttaaataagctgcataggtacaataccttaaacaagagtagaaatatatgtatactatgttatgttctttttcttatttaaaaaatatttttcattttacataccaaccccagtttcccctccctctccttctccctgccctctgcctctcactcttcctaacccccatccactccacagagcaggtaaggccttccttggggagtcaataaagtctagcataccaagttgagacaggaccaagcccctccttcctgtatcaaggctgagcaaggaatgggctccaccataaggaatgggctccaaaaagccagttcatactcctgggatggatcctggtgccactgccaggggcccccacagcagatcaaatcacataactgtcacccacattcagagggtctagttcggtcccatgcaggttccccagctatcagtccatagtcctctagcttgggtcagctgtctctgtggttttccccattgtggtctcgacccccttgttcatatgatccctcctccctctcttcatcggaactccaggagctcagcccagcacttggctgtgggtcactgcatctgcttccatcagttactggatgtaggttctatgatgacaattagggtagtcactaatccgattaaaggggaaggaccgttccaatagcctctccattattgctaggagtcttagcaggggtcatctttgtggattcctgataatttctctagctccaggtttcaagctttgtccctaactccataatgttccctctattaagatctctctttcattgttctctctctcttccctcccccaactcggtcttcttgatccctaacattcccatcccccatcccctcccttctaccccctcccagtttacccaggagatcttaactattttctcctcctggggcgctccacgtatgtcccttttatggttctcctttttacctggcttctctgggcttgtggattgtagcctggttagcctttgctttacatctaatattcacttatgagtgaatacataccatgtttgtctttctgggtctgagctacctcactcaggatgttttttttttttttttctagttctacccatttgcctgcaaatttcaagatgtcattgttttttaacactcagtaatatattccattgtgtaaatgtaccacattttctttatccattcttcagttgagggcatctgggttgttcccaggttctgactattacaaataatgctgctatgaacttagttgagcaaatgcccttgtgttatgattgtgcatcatttgggtatatgcccaagagtaatattgctaggtcttatgataggttaattcccaattttatgagatgctgccttactgattaccaaagaggtgtgttctaacaaaaataaccttaaatttgtattaatgtacaaaattccataccaatataaaatatttgagacttgtggttgttcaaaagtagactcaacaatccacccttttattccattatttctattctataatcccccttttcccttcagaaacagatccctgaacctaatcctgtttgtttagctttttccctgaccatgatcagtaacaatttgtaaccaacctcccaaatgatgacaaacatccataacccactgaacaaccaaaacccacccacaccacctcttgggaatgtggtgtcatgttctctagactgcttcctgttgtctgaggcatctttggggaaccctgagaaaatcaagataatggcttgaatagtctgcgaggctgaaacatctcagccagcagccttgaaactgttctggatgcagaactctgaagaaacagcaacagaggcattctgagaggctggatcacctgggccacctgttttcattggtgtctggtccccttgttctgaaaacacataaactttcaaaggtcatatatatctgcattaacacaagtatggaatgtgcaatgtgtacaagtcaattaaagatgattttttgttttatgcggttttttttttccagacaaggcttttctgtgtagccctggatatcctggaactcactctgtagaccaggatggtctcaaactcacagagatccacctgcctttgcctcctgagtgctaggattaaaggcatgtgccaccactgcctagctttttgttttatgtttgagcaggtaaaatgtacatctcctgttttgtagttttattaggtttatttttttatgtttgtagccaggattttcagggggtccttcctgatcaaacctggtctatatcaactttgatggaatcctcagcctttcattttctatggaaataaaaagtataacctcttccccaaagcaatacattttctgacttccattttaaagttaaggcattcctaaaataggctggtttaattcagcagtctctcttacaatcccatgtgtctcagcagctgtcatttttccatcagtaatcaaaaaaattgaaagtcaacaagacaccatatagaatccagactctgtatattttccataatacatggcttatcctttttatattattttatttgctctttagagactgtatttcattacttataaactattttttctatgattgtctatacccattttcttttttaagtctatgtacattttttaacatattgtacctctttataggttttctgtgtctggacttggctttactgagtatcagcaggattctgggattgtgtaagacaaatcttaaactgtcatgtcagccactggtccagctcagcttagggaatggcacttagcacatggctctggcagctggctccagaccacaggcagcagccagtggctgcacctttttatgccacggagcactggcccacctgggagactgcaggactaggaagctacatccgactccttgtccagaacctttcttacctttctcaggctctatgtttggatattcaagcccctacattggatgccatatgtagatggatttttctttgggccgacagctcacaaaaagaaaaaaaaaatggggacttagtcttaattataaaagcttggcctatagcttaggcttgtcccactagctcttataacttaaattaacccatttctattcatctacctgttgccatgtgactcatggcttttacctctcctcctgcatgccttgcttcctctgcctctggctcacgactctgtcttttttctttccagagctctctctgtccagatgtccctgctatacttcctgcctagtaggtattggccgtttagctctttattaagccaatcacagtggcacttctttatacagtgtaagggaatattccacaacagtggggcgataaggagatagttgtgcaagtggagcacccatttaaagctgggtgtattgatccatggcacatctattaccgtggatactttggaaggcagaaacaagaggatccctggagcttactggccagtaacttctagctgaactggcaagattagttcagtgtctcaaaaaaaaaaaaaaaagagtgaagagagataaagacatctgctctccacacacatgtgcacacatagctgtgcacttactctacacacatacacacagttgttaaagagagctgttcacataaaaacatactgtagagacaacattttcctcatgctacttacaattataaaatgttgaaagcattctctttgttgaaattaacacacatacttcattttattttaacagcatactggagatcctagttatgccaataagaaagtaacaagaaataaaattgtaaggattttgagctggagagatggctccccagtcaagagcacttgctactcttgcaaaggacccaggtcagttcccagccccacaaggcagctcacagcaatccacaactagtttcaggggatctgattccctcttatgacctcctcaggcatcaagcacaacatggtacacagacatatatgcagacaaaacactcatatgcataaaataaaaaatagaaaggaaagaaggaagagagagagagagagagagagagagagagagagagagagagagagagagagtcttcagactgtttctattcatctagagccagatcgtttgtattgctgagttcattgttgtccttcattgtattctgaaatattagaagttggttaaggtcacggggctagggagatatcttggtagtaaagtactgtcagagcaaacatgactatccaagtgaaaagtaaaaagccaggagtatataacgtcactctcttgcctccatgaatgcacacttgagaacatgcacacacacacacacacacacacacacacacacacacacacacacacacacacacacacacacacacggggggggggggggggagagagagagagagagagtagggggaatcctcatgtcctttatttgaactccacttttaaatttgtttgaatttattgttctaggctcctgataaattacctcaaccttgcaaaacaatttttttttttaatccacatctggcctttggtgatatctgtaatcccagcatgtaggaggtaaaaaagcaagatcaggagtgaaaagccactgttgacccagcctgagctgcaagagaccctgtctcaaaaaacaaacaaacaaaaaagattcacgtcatccaggggcataaattgtgaccttataaattctagctgattcaaagaaaaaccaagagaagagaggcgagccgcagcctaatcctttccggactcggctctggaaccgctccttccggtgctgaaaattggtagaaatttgaaaattatgagaccaatattgacaatcccccaagagaggctaccaattgggcaggccaggcctcagctgtctgcctatctagttgatttagtttctctaccaactgttgcttcgcccacccagaatctcccagagaagctcaattaaaccttgccttagtgggatttgtttttccaggttaaatattaggcctaggtttcttttgtctcccggtgttaattctgaattaaatcctcattaactgtgcctatggagtaacctcatcggaaccacttctcttccatcctctcctaaccctccgtgtcaacaccaatttccattcctaagactctggagaaatatagggtgagcagaccacaaaacttgcagccactgggatgagtctgaacccacggcgtttactgggctaaggggtaagatggggaaggcagctaactaccgggggctttgggggctttaaaatgtctcacaacaactccttgcctctgctacccaaggacaggcttcctcggggaggctgattcggagctgagtcacttgtactgtaagtaggtggaaactgatttctttattctactgccttccaggactctatctctttctctgggttccctttcagacagcctgggctgctggagacctggctataaaattaaaaaaaaaaaaaaagtgtccttccttgggctgcttctggagattctgctctcctcttctgctctcggctgttccgctgatgaagcttcacctcctttccgtgtggacagccggtaccttgcccttgagacagagtgaagtttgagatcgtgtttatagtatggccagttgttttcttgttcttatattttagataccaaacaagtgttaagcttcctctgttaggtggcctccactctttggtggagtgcagatgagttctgttggcaactttatctgcttccagggcaaggaaaaacctagttggccacccatttcttggaaagttaaacaaatctatttgattcagaggtgaaggtcagagctgtcaagatattaacataaaagatgcaaagcagctttttgttgactagccttgtattgtccccagttctctttaccctgcttttgccatcccctagccggtaaaaacataaaaagcaatttattctaagaagtactccaaagtgtcagctttgacctttgtcaacttttgacatgtgaatgctttagattttcttcagagaatggcttgtgggatctgagttcaacccactcatacagtgcaaaattgagagtttgggaatccatctgtgtgtaaatcacttcactctgtattcactagagtcaaacccaggaaccaacatgccgtttattccaaccttccttttcctttatgtgtgctgagtgttttagagtcgatacccagttagcctaaatgtccactagatggatgcttgggtgatatctgcaattgtggatgagtgctatgtttcactgacattggatatttgttctgatgcttcctgtggagaggctgtaggaggctaaatggatggcacactttttctttgtttgaggaaggccttaaaggatcaagagaatctcggcccactcccgaaagcactttacagtgctttgggacccttctgcttcatccagttgtctcatgggtattctgaaggcttgctcagctggattttcccaggctatgacttgattgattctttctggcaggaagctgctgcatctgacatgaaagcgtcctcccctccttttgctgtaaagcctggggagctgagaagagtgactcatcttccttcggccacactgaggaacaacactccaagtacacggaattcagagaggctgtgatgtatttcagttgatagagtgttttgctaacatgcatgaaaccctgggtttggtccctagctctacataaaactggacatggtgccgggcatagtggtacatgtctttaatctcagcactcaggaggcggagtcaggtagatctctgtgagttcaaggctgacctagtctacatagtgagttccaggccagccaaggctgcatagtgagcccctgtctcaaacaaacaaataaaactggatatagggtacatgcccataaccccaacacttggaagggagaggcaggaggatcagaagttcaaagttatccttggctttgagacgatctcaaacaattaaacaaataaatggaattcagaaaatcaggagatagcatgtctcctgggaaacagaagtgggaactggtttcaaaagatgttaggtaagcagatggaagggagtagtgtctggagtgttggagtgtggtcattccatcagctcctacctgtagtatattcactgtaccataggaatgagcgcctgggacctgggaggcagcccacactaacaagcagctgcctgggcaacaggcatcatttcaaaccttccttgcactttgaactcaggtgcctttaagccatacttgggcctcaggtgaattctgaatccaaaccacctgaggacataggataaaataaccacagactcattttctcctgttcacatgctcaaaaaccaacagaagacttgagtgacagatgtgggtgctggtctctgcaaataccaagcatgcttacaattcgaaagcagatgccaactgggtatcctttaactcagacagtgccaggttccacattaagggcatgtccagatgtcatacctacatctcagagtgttttgcccggcttctaaccatccattgatgagttgggattttcacaaccctctcctcagaactcaggggtgttattaaggtatattgcagtttatcatacaggatactggtgggcagactatgaagagatgcctggggcaaggcttaggggcagaggggacacagctaccgtctgggaatctccatgtgatcagctggacagttctctgcaccctgccttgggagctttcaatacatcagaatgagtgattaactaattggccagctcctcctttagcctcccttccctggaggatggagggcatagtgccaaagaattcaacaaatagactcctgccttggttcttccctgaccagctagcactgagaccagaggtttatgtaggtatccaatgtaggttttacaacctcactatcaggttttgagcaggaagaggagcaagaattcaaaagagaggtacggggctggacagatagctcagaggttaagagcactggctgctcttccagagatcttgagttcaattcccagcaaccacatggtggctcacaaccatctgtaatgagatctggtgtcctctgctggtataaatgtatgcatgtagatagagcactgtatacacagaataaataaataaataaatctttttaaaaaattaaaaaaaaaaagagtggtactcagccgagttgtcttcaggcaatagacttactaatgttgaagctgttagtataacagggtctgaaataagaatcttcaatgttgcttggcagtggtggtgcacgcctttaatccaagcacttgggaggcagaggcagctggatctctctgagtctaaggccagccaaagcaaggtgtctactctttgtgtgtgtgtatatgtggtgtttgtttatttgttgagacagggacccctgtgtagccctgactggcctggaactcactatatggaccttcaactcacagagatccttctgcctccgcctccaggtgtaaaggtgtcactcatcacttgacaaggcatcttctcttagaggtttctgagataatcaagatcttgcatttggggaagcaggctgagttaatgtgacttatgtcacgtggtagaaatagggacgaggtccagatgtgacttaggctatgacaggagtcactctttctctgggtagcagtgtggggcttggttaacatgtgacccatgtcaagctgcctttgactcccaggcagcagggagttgtatgcatttccatcctgctagaggccctctctgattagggcctattagtctgtattctccaataatcatatcacccatcagcatatcactccttttggcgtctgctaggcacaatgattagtcacaatttaatctggacatagagatactgctcaagagaccacaaataattttaatgttgttaaagaaaaaaattaagtttttacttaaatggtaagaaagagtttatccaatagtatttcagtctggacccgatgactaaggcctataattctagatattccagaaggtaagataagaggttcacaagttcaaggtcagcctgggctacagattgagttcaagtactgcctaggcaactaagtaaaaccctgtcctaaaataagaaaaaaaaaaaaaaagagatctggggaatgttatgtggtaatagagtgcttgcctggtgtatccccagtactaacaaaaaaagtactgctatagaagactctgaacacagcaaaggcaattgaagagagcagagtaaggatgatgatgagatgggtaggggaaaaaaaggcttagagcagtggttctcaaccggtgggtcacgcccctttggaggtcaagtgaccctttcaccagggtcaactaaggccatcagaaaacagatatttgtattactattcataaaagtagcaaaattatggttatgaagtagcaacaaaaataattttatgtttgggggaccatcacaacataaagaactgtattaaaggatcacagtgttgagaaccactgccttaatggaaacaccaattataaggggattcatgtgatcataatggagtatttgctacaggcaggtcaaaggggcttaggaacttagatattggacagtgaaagttgctaaattgacttagcaggactgttgctaaaactggaccagagggcaagatcaaagcctagctgagaatggtttcagaggaacctaactgaagtttgatcagggagaaagtcttgttttccttcccactctactgtaccagctcagctacaaaagagggagaggtctctgcttccttcagccaaccccttcctttttccctttttcccagactctctccttgtgaagagtgagaattggcagactccaaatttggcctctcaataggcagacttatttctgactcagtctagccagggaagcttgcttcccagaagcagagccccatccctgacagccccactggcagccttagtcaacaaaaatggaactagagttaatttgctggcttctcttcagtcatctactgtgtgaatggagctgaaggaatcctaaatccaggccttaggaccagaacagctgttccggttttgttttgttttaatttcttccataacaagttagacttggccaggacagcaaactacagtccatggaggtttttggttgttcttgttcttgtctttgagacagtgtcatgcagccaaggatggctttgaactatatacagccttcacatgctgaatcctgggattacagagggttctttggcagcttgctttgttttgttgtgggagactgttctttgttcatatgtcttatttgagactgtagctcataatggcttcaaacttgtgagcctcttgccttgcctcccaggtgctggaattgcatgcaggtgtgcaacattaagagtcaagggaatagctttgaggagtttggcatatcccaccaaaagaaagcaccaagtgaactcaaagaaaataacaagatcttataggtgatgtgaattttccttcaggaacagtggcaaactagttgggtgtggtgcttgcaaccccagcactcaggaagggaaacaagaagatcaagagttcaaccctagttgctaaggaatgattttgaggccagcctgagatacatgagacactcaaaaaatcaaaaacacctgggcataggcctttagttctagcactcaggaggcagaggcaggcagatctctgtgagtttgaggtctacggaggtctacagagtgagttccaggacagccagagctacacagggaaaccctgtcttgaaaaacgaagaaacaaacaaaaataaaaaacaaacaaaacccacaaaaacaatgagaagtctaaaggtttgtaagcagaaagtaatatgatttgaactgtttcaggaaaaaaaaaacccactatatgaatggacaggacaagacagaatggagggtggttgaagtggcattcatttgcccaagcaacagcaagggtggctcaacctagggtagttgtaagtttttggttagtggctcagcagcaccttctaggattgggctaaccaatgacagcaaatccacaagctcagaggttgacaaattcttcatgcttagtgggccttgactttctaatgttccccatcagtcatggcttaggctggttttaaaactccctcagcatactgggctcagtgctttgagctgcctctctgcagacccactctaaaggagttagtcttgaaaagtgagcaaaatttacagccagggcttctcctttttgtcagtcctttcttcctttaaatgttcctctcccaacctctgcagaatttgtcctcctgacaccatttcctcagaatgctgctcttgggaaaaggggaaagtaatcaagtgacacaaattgctaccagcttaaccgtgtctgaggtcatttgttctattactttagtgacctctaagacatgatgtggtaactgcgtaaataaaggtggctattttgaggtgggatggatggcctgaaattccattttactctggggacatagctcagtgggagggtgttgtctggtgaggactttatctagaatgaacttggactactgtagcttgactcacaaagtagcaggattcaaaccacatacttgggcctggtattccactgggatctcagggaagatcttaattttttcctgtcagctctagcccagaggtgggctagaggacttgaggaggctccccaggggaaaggtagaactgagaaatagagacagaatagccatgacatcctagacaagttaaagagagtctcattggtaaactggaagctactaaagcagaattgcagagctctgcccccagcttgtccctactgcccagcaatgattgtagagtgtaaccttacaataaaacattacctcacatctgacaacttattctaaccaatgctgactgatctcgattttttttctcccctccacaatttcttctctacctgggcaggctggagcccacttaagggtaagcaacatgaaatcacaatcccttgccttacaggtagggtaagcatgcttcattttgctttggttacatcatcttttcatttgttgtgttctccaatccacagatgctaattaacttcacactgaatcatctttgtcttccacactggatagtttctaattctttcaagcttattcatctgtatttgcaatgattatctcaggtctttcccttgtgataatactgcatagttcttcaggagtgtatgatctctgtagctttaaattattagtgtcataatggttcaatttaggctctcgtgtgtgtgtgtgtgtgtgtgtgtgtgtgtgtgtgtgtgtgtgtgtgtgtgtgtacacgtgggtgcacatgtgtgccggtacatgtggaggctagaagtcaatgtctggtttcttcctctatcattgtctaccttaatttttttttctttaagacaggctttctcactgaatccagagctctctgattccactagactaactggctagcaagcccaagggatccagctatctttatctccccagcactgagattacaggcacaggctgggtgtggggctccaaactcaaggcctcacatttgcacatcaggcactttaccactgagccatctccccagaccacaagacagagtctccttattcagctctgacactgctgtatagcctaggctgacctcaaagtcaaatcaatcctctaaccaacacaacacagcccttgctgggatcacaggcttgactcatcactcctggtttatatgatgctttttcttgtataactattaagttgcctctgaagatatgtctgaaatccaaagatattttaagcaacttgcaacattacagcaaatttatggcctctcaagctttatagcttagggggaaagcactcaacttgactgtcacaattttggtttcatcagctacaaattatgttatttctacaattaaaaaccccatgatttaggccacacctcgtttgttttttttttttttctttttaagcaaaagcactgctatttttaccagagtagtctgcaaatcattatctaggtccaaaaatcgggtttattgtcagagagggcaaacccttgtcctcaaagggaaggcaccatgtatgatgaaatcctctgagaaacggaagtaccgttagcccattgtgcagtgtctgtgaccactctgatgacaaagatctttctgcattacaagctgttcagagtaagtcataaacatgcactttggctgcaccatggatgggggtggaggtgtctcattggcacacttagaggcccaagttaaacataaactagtttttggaagagactggagctacagaataaaatttaaaatacacatttaaccgcatgcaactaattaaaaatattttctgatagttagattttatatgtagtctaaactttgttaggctaaatctttataattctatgcagcatgggctaactgaaagcttcggagcattatgccaagtattcatgatgcagatttagtttatcctaacaatccacactcaccggtcctgatgtgcatctcattagaacccaaccctgcactcatctgaagtctgatacattaatgagaaatattactggtgcataatagcacaagtcacctttctaagatcacatctgccttatttatttttgtttatttttgtgtgtgtggtgccagaggttggtattagttgtctttttctactgctgtctgtgttatcattactgttggtgaagatagttttgttttgttttgttttgtttgacagggtctcatgtgtagcgctggctggcctgggactcactaagtagacaggctgacctcagactcacagatctacctccttctgcctcccaagtgctgaaattgcaggtgtttcctactacatgcagattctaccttagtggttctcacttcacctggtgcttgccatctgtctggaccccaatgcttcacctcaggcttacaggcaggctcccccaggtcttaagggggtgatgaggactgaacctcaggtcctcatgcttgcagagcaagcactttacccactccccagctccttgcttatttatgtttagatgtcattttattattattactgggtgagctgtctgtgccacagcacaagtatggaggtcaatttctctttggtgtcagttctctcctcccacttttatgtaaactctggggatcaagttctggcctctagacttgcaaaataagctcctttatccaggtcctctttatttattttttgagacagggtgtcatgtatcctagactggctttgaactcaaaatgtttcagagaaagatctagaccttctaatcctcctgcctccacatcctgagtgctgatattataagtgtgcacatttgtgcagtgggaggtggggaaatccaagctgtttgttaggcaagcactctcctaactaagttacacctccccacacacatctgccttttagtgtgtgttgggcaggggttgagcacatgtgtatgcttgcatggcagtggcttgtacagggacacaagttacaacatatgtacctttcgaccctgtttaagacagggcttctcaccacggagtatgctaggctagctggcctgggagcgtctggggattctcctgcctcccatctctccacagtggtaggctaggatcacagacacttatgtttctgtgtctcactttcacatgatttctggagacccaaactcagtttgtcaggctttcatgacaagtgcttttatccactggcccacatccccagcactgcatctgcttgtttgtttgttttgttttttgttttggggggacagggtttctctgtgtaacagccctggctatcctgaaacttgatctgtagttcaggctggccttgaactcacagagatccacctgcctctgcctcccaagtgctgagattagaggcattcaccaccaccgggttatcacatctgctttttaattagtaagggtcatcaatatctttacccaaaacatcaattaattatgccataatttaatacatacccatagaacgaatatgatgctcttaactaagtatgagaccctgtctcaaaaaaagggagtaaaaaaacaagtttaaaagaaaaaagtgggaagaatggctttcatacaggggccaggaagcagctaagcttgactggaatgtatacttctgcatactcactcagtttcagtgaatgtatgggtgggtgcacgtaaaaaatgaacagaggccgggtggtggtggtgcacgcttttagtcccagcacttgggaggcagaggcaggcggatctttgtgagttcgaggccaacctggtctataagagttagttccagaacagcctccaaatccagagaaaccttgtcaaaaaaaaaaaaatgaacacaggaaggctaaggctagaaagatggccccaagtcctgaagcaatgtcctaattgttttccttcctcttattctcttttccttccattcccacagcctccagagcgatttttctacattgcagatctgattaaagtcctttttctcatccacactcttcagtcattttcagttgaagatattgctcaaactgcttagcatcatttgcaagtctcatcctcttgtgtctacctgccatctcagcaaacctgtagcttctcaaatgcagcatcctctctgccttagatttccctcaccccatatatctcttaacagttccataatttacttctctcatccagatagccaattgtcttgtcattactttacaaatttattgttctttgtctgaagaatataaaagcaccatgctttgggcatttcttcagacttcattctcttgtgaacatccccatatacatgtaaatttaataaaactttatgcttttgctcttattaatcagtttttatactaattgggttcctagatccagccaaagagcccacataagaactaagagggggtcgagagaacctctttcccctctacattcatataattggtaagtgatggagtcacgtatgtctgaccacagatccaacatcctttcagcttcactgtcctacctactttatacaaagaactgtgtctaactgatgagaatagcccctgtgaacaattaaagaacaatgaagtactgaacaatgtccgtggtattgaagagcaaaggggggttcaaaaagggagagcatattatttgggctgcctggctggaagaaaaacgtgcttagaaccagcctttgaacaggccctggaggaagggtgagacagaaccaggagtagtggagaggatgatatgagagataagcaagatgctacataagcaagagaaacatggcagggggtgggggtgtgtgtggatggagtcagtatgaagcttgttccgttggtggtgagtctttggagcctttaatcccagcactcaggggcaagggcaggtgcatctctgagttcgaggacagccagggatgcacagagaagccccgactcaaggaagaaagaaggtggagggcggggggaagaaagtgaggctggggtaaaagacaaggggggatgcttgaagggcgcagaaagtaaaacttggtgagaaaaatagaaagatcagggagagagagagagagaaagagagagagagggataccaagattctttcctagggaaggtggtccctggaggaaggcctacaagagagtcaagttctgcacacacttgccatattgaaagccacctctgcactgtgagtgagggaagctgaagccaggagagaggttttctgctagtgtagatgattctgctcaatgtcctacctggagagggtattcagggagggaaagaaagagccacatgtctgctcagccagtctcccatgctatctctttctgtcagtcttctgctatgtaagctgtggtcatggcattcaaagaaaaggaatgttttttcaagtatgggccctggaggctgcctaatatagactatcttattctgctgaagattgaggggggtatcagaggaaagacaggaagagatggggaagggagaagaaaatatcagccattatttgccatgttggagaaaatttgaactctgacttttgtttttacttgaagtctggctttaggtctaaaccacttgtaagagaaagccctattgcagaggacagggaagcacttttgagggtgccttggggtaaaagctgggtatggtggctcatatctgtaatcccagcacttgggtgttcgtatgcttactacaagctcaaggtcagcctggacaacattgtgagttccaggtcagcagggactacacagtgaaagcttgtttgagaaaaagaaaatccaaaaccaaaacaaataacaaccctacacacacacacaagacttgggttgagaagaaaactcaactcctactagcttaaaacaagggaaacattagtttatatggaagtccaggtataaaatggtcctcagatgagacataatctagtggcttctgtgttaccaatttgtttgtttgcttgtttattttttagccaggggatgtggttttagtaacaacccagactgagcctgaacatactatgtagccaaggatgaccctggatttctcattctcctgattgctaagattatgtagttgcatactactacccccggtttatgtagtggctaggaattgaacccagggctttgtgtgtgctaggcaagcgctctgccaacagagctacatagccccgttttacatattctgtcacttgttttgaagagttagcctgcatatgggtgcaaaccactgatatagtccattcctgtcactttaccagaagagaaattgaagcctgtcaaaaagagcaattttgcccagagttgtacatctcctttaatgctgagccaaccctaaaaacacagtggttgggccagtgcccgctctcaactaactaggctttgtgaaagcaatttggtggtgagtttatgacaggcagttcccggtgatgaaaaggaagacttgcggtgatcagaactggcataccggtgggtggatttctaaaggtcaggaccatcccctacaacttcacgaagatcggaaggggtggaggccagttgattgggtcttctcctgcaatgtaacacacatgcagaaagcctggtgtcaaccatgttagtgtctctatgctgcattagaacaccatgaccaaaagcaacttggcgaggaaagggtttattccaggttacaactttcaggtcatagtccatcaccagaggaagtcaggcaggcacctggaggcaggaactcgatcagatggcatggaggaatatctcttactgtctttctcttcatggcttactcagcgtgctttcttacagcacccaagacgatcaacccaggggtggtgctgccccctcgtgagctgggccctcccacatcaatcatcaatcaagaaatcgcaccacaggctgcccacaggccagtctggtgtgggcagtttctcaactgaagttccctcttcccaaatgactctgacttgtgtcacattgatataaaactagccagcacaccaactaaattgagagtggagaggaggaggctggagctggccagacagctgcacagggagccagcagtgggtaggatcaggatgagcaaactgttattctcttctctctcacagcacttgtgtattgggtggagggaaccttggaaatgcagacctaggcttttccaaaacaagagagggaaacggggcagttgggtagggaggggtggggatcccatagtgacagaaggcattcaagggaagaaacttgctaaaaatccatcagccccttcaaactccaactagcaaattaagaaatccatttagcttatgttgccataccctgacacagtctgatctgtgtttgttccctctagattagcagggaatctggtatgagatgatggccacttgccctcaggaggctttgtcccttatccctctcactgagccgtaacatgtactctctttaccttagtaagacttctgccactgtgaggcactcctgggggggggcactttcaacagctctgcccaggcctaaggtctcctgggaccactgcttatacaggaacaagaaaagaaatggaaagagtcagtactccgccctctggacagcacaaaccaacacaatgcattcttgctctctttgcttcaacctccctccctttctcgtcttctctcttctccccatctctccttttctgtcatctccctatatcaacacccctgccctcagtttttctagacatccggccctgctaagacacttgtgtggccgagtcagccagccagcccaaaggcacatcctcctcctaccaccatcttctctctgaactcaccacggaccgccttctctgtccaatttaggcttctcaggatggatgtcactcgcctactcctggccaccctagtgggcttcttatgcttccttgccatctacagccacatggtacctgaggagacactcagagatgacaggagtctgaggagcaactcctccatgaactcattggatttctcttctgtttctatcgtgggtaagtagcctggcctgggacctagcctctaggctgtgacccatgagagcaggtacagtatgtcaagcctgttgcccaggctgccaccagcatagctatggctctttcttgctcattcctagggaaatacagagtccttgagtcattgggtttgggaaagcttggcatgccaccaagttttggtgtgtcatagatctgaagaagcctcaagtcgagaagatgcttggtgggcttagtttaacttagcatttataaacttaatgaatcacaaaactcaacaaaacaaactttaggaaaaccatggaatagaactaagtctacaataaaccagtctcaccataggatgcatcaaagtctggcattggggatcttgtggtttgttctcactttggaccagggatgaagcacaaagtcagagcggatgcttagcaggcataatgcccggatccagttcctggaaccaaaataaaaataaacgcgcaaaggtttgttctgtgaggtggctcttgagttttatttttatcttacaacagacaaaactggagcttactgacattagttcctaatgggctgaaccagaattcaaacagcagccaattatacatgtaagctcacaactctgtgttgactggcatttcaatggacacagaaagatggtctagagcagcagttctcaaacttcctaatgttgcaacccttattaatacacttcttcatgttgtggtaaccccaaccataaaattatctgtgttgctacttcataactgtcattttgctactgttatgaattgtaaagaaaatattttttgagatagaggtttgccaaaatggttacaacccagaggttgagaactattggtctatacatatcagagaagtcaaaggagggaaaggaggagacaccaacattccttaatcaccattgatatctcagactttttaaaatattttacttttatgtaaaggggtgttctgccttcatgtatgtctattctctgtgtgcagtcctggtaccctcagaggccagaagaggatgccagagcccctgaaactggagttaccatgtgggtgctggggcacaaacctgggtcctctgcaagagcaccaagtgctctcaacagctgagccatctctccagccccatgtcagactttttgttttataaatatactttacatgatagaaccttttgtaaatgagggaactgattgtccaggagaagatcacacagctgttatatggattcaagtcaggcatagctggccctgagctgaaaattaaagaaaaaaaaaagtaacacagatgtgtccagtaacaaaaggccaagttcatttccagagactcatagtgctcttgcacctgcacggttaaaggctaaaacaggggcacctatggtgatcaagggccacacagtcaaaagaccaggaaggtctctgacagaggccacagacaggtccccggtccctcttggatttcctctttgccttccctcggagcaccctgctcttaggtctgatgccaggctaataagaacctgctggcttgatttccataatgtgttccatcctggagtccctttttctctccactctgagacttcccatagcccctgctcctcccacttcataactcaggcccccagaaacatctggctttgctcgttctgtctttctttgaagcactgaacaagaaatccaagaagatcaacagaaaagaagccgagaagcagaagagatcgtccaaggtaggcctgggggttctcacagtgagggtgggagatctgcaagccatggctgagaactaaatgtaagatatctccaagcctacatgaaatgactgaaaactacctaaaggtttctggcctagagccttgaggcagacttccatagaagccagggagcctaagttcactgaacaaaacagctacctgattaaaaaaaaaaaaaaaagtttccaatgcaagcatccccaccccttcctgaaagctggcactcaatcttttggatatttacctaaaccccaactgctgcagaaccactcttgctatacctgagtttcttccctgcccccctttgtagggcctgtgcaaggtaggcaagtgttccaccgctgagccatactctcagcccaagattatttgcagcaagcttttgctatgtagtacaggctgcctgtgaactaccaaccctccttatccagagctcaagtgccgagattacaggtccaggctaccgtgcccagctgtctcacctgtctgacaatcagaaaacgtcaagaataggaattagaagttgggggtggtggcacacagctatactcccagtatttgggaggtggaagcagtaaggtcaggagttcacagccaccccaaactacatgccaagttctgaatgaccctgggctgcacaaccactgtagctagagtaaaaacctcaatgaaaataaaacactggtagcagagcctagcagcacaggcttttaatcccagctgcttaggagactgagagaggaccctcagttcaagggctactggagctatgcagcaaattcaaggtctgcctgggcaaactgaaacagtcacaaaaataaacatttcaaaggggtggggatatagtgaagtagtgaagcttgcctgtaacaaacaaagccctgagttcaattcccatcagctggatgttattacctgctaaaggctctaaatctcgcttttttaaaaggcagttagacctaaagtacatgtgccataccagaccaaaattagagttagaattataactggtaattgttactttcaacaagcagtctagataagtctagcaagtcagacagaaaatgcttgaagagacaagcaatttggagaacactgttctacagaccccaaaatggtctactttcttgtattacatatatatatatgtatatatatattcttaaacattgggcttgtttactaacaaatgcattcattaaatatatttactaagtatttaaaataaggacaaaaaagcagtgaccgctctccccgcccccccacaaaaagaatgtgttggaaagcaattaaggacatgtcatcaccaaacacaagctaaaacagaaaaaagaatgccttctcactaagtggttaaggatcatttaacgttttcttacctcccacctaagatcatactgccatgatacaggttcccacaatttgataaataccagattgaagcattgttgaaattcacacactattcctgtttttgtgcctcagctaaatggatcaaccgtaaccagaacagggaggacagaacaaaatacatgtatgtgctaggtgctgggaacacagcagtgaacaagaggttactgatgtgtggagcttacacctgtgtgggaaaaccaggccgcaagtaaattaataaacaagtttaaatttttagatgacacacattgtgaagaaattaaagcacggtgaaggcctaagtgcatttaaatgaaaaatatagaaatctagagtagcggttctcaacatggtatttccattatgattcataaaagtagcaaaattacagtggggtctcttaagaaaaggccaggtcggatctaggtgagcttgtagatgaaggcggcgtgcagggtggggtggcggccagggacccactaggatggcctgtgcgttatgagtagaggtgggcaccgcggcagaggtcctggtggcagacctccacagcagaagaggacgcgcgggaccagcgtggcccgctcagcagccctcgacgtctttcctacagaaaaaggcctcgacgaagaaggtggcacggcccccgccacccacgccctgcgtggccacccgagacagctgcaagccgcctgcacccgcctgctgcgacccgtgcgcctcctgccagtgtcgcttcttccgcagcgcctgcacctgccgcgcgctcaaccccaactgctgaacgcacttccgcgctgcgcgcgcagcctccgagatgggtgattgggcggggcttcaaggctgagggaggggtctcttcgtgggtgggcgtggtctagggtggtgggtgctttccgatgacaggtgttcaaggaaccctaatggaagctaaaatcagaatacagtatctttcggctgctgggaaagtgtggctgtttctttaaaagagccgaaagcttccggcccctttaccgagctctgatccttgcggagaccccgaggatcgcgcgtggctggtacctttgcttctagcagtaggcacgatgctgcccggttccttccagactttcagtaccggctgcctccagtctaggagaaagggagctttagggaacggccttccagtattttcaacgctctcctcccggggaggagtacaaatatcccaggcgagctagaaatccacaggcagtctcagccgggtaggggcggggtggtgcatttgttgtgggtttctaaagccagaaggatctgggttgaggatcctagaacttttaagagtctcccaaacaaaggcactaatgaaacccactcctcccttcctcccaagggcatacagatgtttggaccataagaattttccgggcattagtccccatgcatttaaaattattattctaataccctagagtttgggctcctaaagaagcaaaaatgtacacagccttccttgatcttcacctagttggccggtaagaaagctgtaggggttggggggagctggaaagaagcggcaatcgcactaagttatcaaggacctattgccaaaaacgtcccagactgttccctgaaattccacagagtctcagtttgtgagaagctgaggtgctgcgttgtaactttggaagaaccgtgggagagagagcacctagagaaagtgaagagtttgtggcgcagattctgtgaggaaggagcagcagggagagcgcaaatggagggttctagatagtgccatctacttgtcttggctggggcaccgaagggagaaaggctgagaagagggctcacagggctccctcgcctagcctgagctgcccccaaccccaaattattacatgcaagtaccaaaagaaaaagggctttgccaaaaaagattccatagagaatctctattgggctagggagatgaagacaggtgtaaggtctgatacaggtgtgaccagcttttcgggcctttgtgtctatttgctattgttctctttcaaatgctggcaagatggctcacaagcctgccaatctgagttcaatccccaggaccttgtaaaggtaagagaaaacagagccctcagagttgtctgtcacagtacacaggcatcctcaaactcacatcacatacaataagtgtaataaatgtaaatttcactccctcaaacctctcttcttgccgtagacctttttccaaatggagacccaggttgtgcttttggtgccatacttacctcgaatggatacaagaggcaaacacctctgcccagtcaccacctagacagggcacaagaaaaggcaggtgctccaggcaaagctattcacacagtgctgacactggacaagtccttatgtctgtctctcttacttatctttaaaatgagaaataattccagctgttcttggtaaaaatccaggaagttgtgatttctcaatgcctttaatgcagcaccaccacacacccacacgcatgctcacccacacccatgctcgcccacatgcactctcacccacatccatgctcacccacatgcatgctcacccacacccatgctcaccatatgcacgctcacccacacccatgctcatccacacgaatgctcacccacctgcacgctcaccacaggcacgctcacccacatgtacactaacccacacccatgcttgcccacatgcactcttcacccacacccatgctcgcccacatgcacactcacccacacgcatgctcacagagaagctgcccattgtttgctttgttctctgtcctttaggctgcaagcccacaaggcaagaacatgttgttcttgtaccacagctgctgctgagtaaatgtcatcagtaatgagaatattgggaacacattgcagcaactgctcctgtatttgccagacactgttcactcaccaggtactatttggcgcccagcagtgaagcagcataaaaaactgaacactcagccagtttgttgttgttgctatgtgccggtttgtttttgatattgtttttgagacaaaacatcactatgtgtagctctggctggccatggactcatagaggtccccctggctctgcctcccactgctggaaactaaagaagtgctaccacccctgcagcccactagcacaaagccattgagttactggatttagacaatgccatggaaggcaagcccaggggttcactcattcagcttgtgtgttggccacctgctgtatactgggtactgtaagtactctaatgaaaaactccaatatgggtattgtccctacagaccttaatcattcagtgggcctgaccactggccctcataagaggcaagaacaactgttagcctgtggggctcttcctcacacttaatcttgcttctgttgactcagaccccctagttaggtactacctgcccaggttttccttcagctttgagatcctgagttgttctatcttttcagaattcctctgtaagctttagagtcctaagatcatagcccactttggtggccagaactaaaactcacgtttatattgtatgttctgttatgaggatatgagtgccttagcccatccccacactattacacacacacacacacacacacacactctctctctctctctctctctctctctctgggtaaactttgtcctgtaaaggtttgctccgctattcatcctttcttcccacagccattgccttaaacttgtgcacccgaagttctcataatgtgaccttgaacacgtctcaagtttgtttgttttttttttctgtcatgggggagggggtggtctcatgtaactcaggctggcccaatctgcactaacttcgaacttctgatcctcctgcctctatgttctaagtgctagatgacatggatgcagaaccatgtgtggtttatgatatagtaggcgaagctgggatccaccccagggcttggtgtttgctaaatgaactctaccaaccctcctacctcctcagctctggaagttgaagtcctaagtgagaatctcatcatacagtacacatgaaagcatctttgtcaatatgttatatttatgcacacaaaattgaaatcagcgagtagataacaggtgccctccctaattagccccaccagccagtttgtctgttagtttggttttagaagaaagtttaaatgaccaggagatgtaagaaggtttttaacagctcaccctttacctcatacagcctcctaataaatggaaacagcagggtttatgtcagaatttggtccaggtggttttgcaacaggttaacctttaatgcatagaagatttaaacatgtatgtttttattacatctttttaaaaagctttgatatttttaaaagaaactaaagcttatgatttcacaaaagcagtatacttcaaaaactctgtagtctcagaggcagaaagccccagggccccagatgtcccagactgtggacgtaaggtcaatctaactggcaatcactaggtcctgattctaaattcttccatctgtttcagcgagcacagatgtggaccactacccactgacaggaaattacccttctccaaaaggagctttataaagaaacctagctcccggggccaattcccatgtgtggagggaacaggataagtgaagaataagaaagtgatttgagccaaattagccaaaccatctgtagtaactttcagatctagagtagacttttactctttttcttcttccatgaactaaagggatagacatgtgtgttgaaagagaaggcagctgaaaaggaatttctttgttattgttttatcaagtaaaatatttcaaaatagtaaaaggctgtattccagaggggagttttctcctgatagcctggagaaaaacagtaactacttgccaactcccccagccagatctgtgagttgtatctgggaggtggctccagtggtggtaataatgcttatgcttggccttcttcttgtcgggggagcccttctcaatgagtcttaaaggttttcacaccttccaaactcctccttagaattcctatgcccagtggctgtgtagactactggagcaacagtaaattacagctactttttaagcccatactcagcttccgaagcaagttcatggctcgctgctcactgcaccagatttctagcaaaatccctaccgccttgtgtttgcatctggaccaacctgaatcacgtacttattcttaaaccaatttgcagagttgattgatgaattgattgaagttagttggctaagcctggattacatgagcaccctgattgcctcaagcaggtctcctggaacagtgctgagtctctggggtgagaatctggcttcctgggacttcagaccaccaaagcagagctaagtactcactgcctgctgcccccagagttttcactgctattagtgggccctgtgacttttcctgggttttaacgcatgcttcctccagccctctaagctctcattactattcagctaagacttgggagtctccccccaacagcctgacacctggcggcaggaagtacccagccctgcaaggggacttcagataaatagctgaagctctggggaacaatcactccatgtctgaacactgacttctactttagtaatgctctaagatatttaaggttccagcagcctgtggttttataactgaacttgacacaaaggcagacaccacacactttaaacggggcatttttcagagccgacaatctaagaagatgttgggttaccatccctaaactctgccttccatctcatccttagccagcagattacactggaagggaaacacaggcagtcagtcactccagagttgagccttgccctctgctcagatggtcagtgtcttccaaagattatcgcccccactctgtaacaggggaggattttctttccctctttatggtatctgtgaacatgggagttggtatacaccaaggccattgaatcttgaagtcctcccccagaggctgtttggacaacatgtagatggaagattaactcctataagcaatgtgggcagaagagtccttactacagaatggagtaaggatgtgcttttctaaaatatgggaagtattgtttagatctcaaaagtcttctaaactccttaccctccaaacaactctctccccaacccctggccttaaaacttgacatagaactttaagacaacaatctgaggtatttgtcactatcctgagtgggactcaggtcttctccttaacccgcagatcactgccccacaaccccccaggcctcatcttgtttttttcaggctagatgggaagcacagtgggggccaggccagatactgtgggagcctcagctagttcttcctcatgaaactttggcaaagagctgtggagaaggcccgagacacatcatcctttattgtggatacctggtcattgtcacacctgtgatagagtagcacacctgagtacaaacctacacctgagaccagaagtgaaagttttgtttttaatgaaaaggttctgagagcaagagaacatctccaaaaaaaggaaggtaacggccagggtaacaaaagccaggttaggactgcatgggaccctcaccaggggacagcttagggctgcatgggactctcacagatggaacacctggaaaggcacttgctctatctttgtgctctatctatccaccctcagctggtctctttggagggatcagcatagccactgctatcaagggagcaacactcagaacagcagtctctgcaagtcagggtgggatgaagatggggtgaagcaacccccactgctggagccttgcttttaggaacctaagttccagtttgagttacttaacctaatgttaaggagtctgaaacctcgttccctccctcctaaccctgggcctatggtatagaaatgtcttggattttggttccaggaatccaacctagtacaacagctagctcatccaaatggcttctctcagcctgagtccaagactctagcaagttctcgtgaagaatgagtaagatcctaaaaagtgtccttttgagcaacaggatgcaatggggcacccctctgtaataccagcactccagaaattgaggcaagatttttataaatgtggggttcagcctgggccaaggccatctcaaaacaaaggctttttttggttcaaccttgaacacaattagtgtgcaagaaatagtacaagagatgtgtctcctattttttcaagaattaggattgctttttatttaatactttgtacttttactcattaattttgatcctatccatctatcattacctgttggagacagctctgacatagctcaagctgttctcaactccccctgtagccaaggatgaccttcaccttctgatcctcctccctcggctcccacagggcagggactgcacttccctttcagtctattttaccatttcatgattagttgagaagtggggggctggagagatggctcagccgttaaaggctaggctcacaaccaaaaatatgagaagtgggcccttggcatctgaatttaccaaaacttattttcagcaaagtcatcatatactcatgtagtttacacaccttcaactacatgtactgcagggagagaaagtaattacttaagggccaacgcctaagctgggatgaacattctcagtcccttatccctgtgacactggactgctgaatgacccaagggttttgtttgaaatctttaaaactttgaggaactgggaatggagatgaatgattggctgtgtaagcctgagacctgaatttgatccttagaaaacacatgaagatggaaggagagaaccaacccctaaaagttgtcatctgacatactgtattcacattacactggcaggaagatcagaaactgagtcacctttagctatatagtttgccagcctgggcaacttgagaccatgtctcaaaaacaaacaaacaaaaaaccctacttttctccaaagtcttttcaagcactacctcttctccaatgcctttctcctgctgccagacatggaatccaaaagctgggaagaaaaggggaaggggcaggggatggcagagctgttcctgagagaacctatctttacctagacatcccagccatctgtgttcagcgctcacacttacaccgggctctccattctggggagggcactcagaatgtcattctgtacatttgggttgcctttagttgacttcagggttaaacgggttcactaaatgaccacttggacaaataacagggagctcaatttctcatacgtttttgtatgactcaagttatgagatctctgactttacatttctgagggactccctgaagagatggctgagtgggtaagactactttacacttgtaaaaaagctaagcaaagccatgtcctactgtatccccagtactggtggacggggggtggggagagcagaaacagaacagcctggctccaggttcagtcagagaccctatctcaggaatacagaagagagtgatcacacacccaatgtcctcctccgggctccatgaccacagaacacatacctgcacacaaatgcacacataccacacacacttaaaaactggcatacatggtgatcgacatggtagtcaatatcttatataataaaaggtcaaaatttctttaggcaccagaaattttatttaatccaccttcctttgttaacattctagacactataaatcaaattagtctttttgtgacccaggcttgtcacaaaaccatcaattacaagacagtgacagaccttagcctatttgttttttctggtccctttcaatctctagctgtcacttttcctttcttggttatctcttaatctattctaaccccgtgaaacagggaccaaaagtgccaacctcagtattctgaggtttaagagacggcccaatggtaaataagctctgaggaagcccctccaaactccagtggctcctgccctgtcccgggctgagaaactaagcacatggatctaataaagcccaagtgagggtctggatggtaagatgcatgggcttgtgaccaccactagccacatccagcctcaggacttccaagactccgaagctcgtgtcccctgtggatcgctcccaggtacctcttatcttgactggagactctcagttcccctcaccacacctagaacagtatgaaggacacaacagagaccagccagagtaaccagcctcagcgggacgaacactggcgaagcaactgcaaagttggtgacatgtgctcttgggaaagagaggtagggcctggagtaaggatggcagctggaaggtgaaggacagtcctgtctctcagtagcggtagtgatcaggcttgaaggggccatcaatgggcatgcccagatactgggcctgcttctcagtcagcttggtcagcttcacattcagcttgcccaggtgggcttcagccactgcctcatccagctggagagaaacagaaacctggagttagtgtcatactctagtacccttagcctcatctacccaacagaactgctctggggaggaggggggttactggcaagtggtactaccctcagcacagagtgcttttacattcctaagcagttttatgttcactgtccttagaacttcacaaacattcctaagaagtaggaaggggaggacaatgcctacactaaagaaatgattatcaggttcatagatgcaagtaaaggcaagaagggcctaacctggaatctgtatcagaagcagaatgaaggtctcctatgcctggccaatctagctcaggacgcctgccttctcacggctctctgtaccagtgtgccacataatgggtgaccatctgggcagtacgagctggattcccagtgactcccaagagtacaccagcctctaaaccgtggtttcctcacttgtaggacacacataataaatatatcctatgtggccatcacaaagatcaatgacattcagatttttagttcaagggggtgatttatttagtcaatagtagctactatcatcattaattaaggtacctaatagtgcttagacagtatgcatcttacagacatgcctagttgacccacccaagtaccagggatgcagctaagggatattttgtgtagcatgtatgaagacctgggctccatgtccacaaaatgaacaaacaaaaatttcaagataagcatggagactcttgcctttaatcccagttctcgggaggcaggaacaggcagacctaggagtcaaggccagcctggtctacatactgagatccaggccaatccgggctataatgagaccctgtctcaaaaccaaacagatgaacaaacaaagtaaatgggcccatccattttttaaactacaatatgttgcttatattttaaaattatttcataccaagaccttagcatatggcttctcttcagagctcagaagctttgtccactggagctgtgtcctgggctggtgacagctgagtggcagccacccctttatctggagcatgtattcttcaacttttcacttcccaaccagcctactttaccaactacctcgccattattattcagaaacatattcttgccttcacctgacaactgaggaatggagacaaagctccaaacctggtgagccacacttcaaagcccatgccactatgggtgtgctctggaggattctggaggacaactaagacagtaggcaaacaacataccctgccaagcccacacagggagcccaggaatagcacaggagccttggcttgtgggaaagtcaagagcttaccttcttaggcaagaagtgaaccccaacggggtatttatctgggtgggtccacagctcaatctgggccatgacctggtttgtgaaggagttgctcatcacgaagctgggatggcccatggcacaacccaggttgaccagccggccttcagccagcaggatgatgcggcgcccattcttcagcctgtagcggtccacctgcaagtccccgtggcaacagtaagggctggtaggcaccacctgtctctgcccacctcctaccctgcacaagatagcctgaaatgcccccaaccctacagagctagcacacacaattaagagtagcaaattacctcaccagcctgttgtgagaacttaatgaattcagatctataaagcacttggaatacggtagtaggtcctcagaaggtagcagctagtactgtcattactgccacatagtgtgtacataatcctttacccacataagtatcattttttaaaatttattttgtgtgcattggtgttttgtcatgggtgttgcatcccctggaactggaattacagacagttgtgagttgccatgtgggtgctaggaattgaacccagatcctctggaagaacagtcaatgctcttaaccactgagccatctctctagcccctcatgactatcatttaagtgcttcagcatcaccttttcacaaataaactgaagtctacaaagctgagtcatttgttcagagctacatctaagaagtggctgcaatttgagccttgacaatttgaggccaggtctcatgctctcaattgccattaaaaagttgaatgcaggatggtgagatggctcagtgggtgaagttgttgctgccaaacctaaatttaatccccgggaaccatttggtggaaggagagaatcctctgtgacaggctgtcctcttacctccacatgcaagtatgtatgtacttagacatacgagcatgcaaaatgattaagtaaaatgtaattgtatgtgtgtgtgtgtgagtgagaaacagaaagagagagagagagagagagagagagagagagagagaggatacttatatataaggttggatgcaggactgaggacctgactagcttggtaacagtgcttgcctagcttacatgaagcactggatttaatctccagctgtacaaggcaaaaaagagctcttaatgtacaaagccaaaaccttttccaggaacattgcttttataaccaggtaagaaataaaaagccagcgcctttaatcccaacactcaggaggcagagacaggtggatctctgtgagttcgaggccagcctggtctacagagcaagttccaggacaggctccaaagcaatacagagaaaccctgtcatgaaaagccagataaaagttgcatgtactccaaaggaactatctctcaatgccctgcagcaaagccaccctttctctaactcaataatgatggcctactttgcccagagcaaagacagaaatgcagtgtccctttccagtcctcccccatcctgaccctgctgccagttcagcccacacacctcagctgccagcatgcctgcctggctatgagcaccctcagagccttgtctctttggccaccactgtatacaaagcaatcttcactcccaagtacatagtgacctgaagcagccaggtcaccacgctccacacacctgctgaccaactctgatacctcaaacctaactctgaaatgaggcttatccaacacacacagcactctccaggttacaaaagtttccatgagaggcatcctccccgcccttcaccaccatccctgcgggaaaggctggggcttctcacctggggcttgatgttcaccttctccacagcgttctcattgagccacttcacatcaatctccacgtcaaagtgtccaatgttacacacaatggcatcgtccttcatctgttcaaagtgcctatgagggagcccaaccccgtgagagaccagagaccaagaacagccccaagcctgtgcacctttgcacctttgctccctaggattcccacgtggtacctaccggccaagaatgatatcaacacagcctgtggtggtgacaaagatattgccctccttacaggcctcgtccatggtggtcacctcatagcctgcgcagacaccgagcatgagttatcaaaggtggcctcagtcctcctctagccccaacagccagaccttgagctatcataccctccatggcagcttgtagtgcattgatggggtcaatctcggtgatgatgactcgggccccaaaacccctcagggcctgggcacagcccttgcccacatcgccatagcctgccaccaccgccaccttgcccgcaatcatcacatctgtggctcgtttgatgccatctatgagggactcccggcagccatagaggttgtcaaacttgctctgaaaggagagggggtaaggggatgaggggcaggcaaagccttggcctcaaagcatcccacaggcctgagacttgagccctgtcagcctggctgaccccctaagaatcttctccactagacaatgccaacatgaccccctccccatcagcctcaagactgtctctctagcaggtctctgctgctctagaagcagcccagggaagcaatgcccaggacaggttactgggtcaaagaatgtgcttaactttaaagctcttgataatcaaagccacaatgttcccgaagcagccatgacccactgtgcaggtctcccttcaatgcactctccaccctcagcccctcaggtaagggcttcatgtcccaggccatacccttcctggacactcttcagagatccactcctcggctcactgggcagcaacaactggagctgacactaccccagggctcaccttggtgacagagtcgttgacattgatggcaggcaccttcagtatcccattggccatcatcttgtagaggttgtggaccccagtcgtggtctcctcagagatgcctcggatgcctgaacaagagagggagagcatcagagaacacatctctacccaaagcccttctcactcccaagtgtccccctctcctttattcccatctctgtacctgaccgtaaagtctaccaagtcaccaaggccagtatcatctgatgcctcccatataaagtcctaccaggcctaatgactcaacttcccaacaccttcctcccaccactgtgctagttagtgcctgacactattcttcatccagttgtcctataatactttcaagagatggcttcttcatttactagtcatgctagtttttgtatagtcaatctttttctacctcagggccttttgtattctccaccctccatcctcctcctccctgtcacacagtcaacaaggctgcttctctgcaaccattcctagcactgccctacattagccttggctaatgagctcagcaagctctggctctaccccgttaccctggcttcacagcacaagtcagaaggcagactccatgcctgcaggaacctcctgtcctccaggcctatggagaatctgggcgttctgccaggcccattgcctcaggtctatgaaggggcaggctcccttcaggccactagtgcccagcccagctgcttacctgacagaagctgtgggtacttggtatggatgaggttagttaagtcaccaccatcatccagaatcatgttgagaggtccatctttgaagtgcagcgtctgctcaatgcaccacaggtactcttcgtctgtctcgcccttccaggcatacactggagggtgagtggcacatgagaagctggcagggaggttccagaaacagagccaattctgtccccttcctaattcccatccctatgtatgtccagtctatagaaagcaatgggaagtatacagcttgaagctagacagatctaagctcaaaccctggctctgaactttccagccaagtgactttgagaaattcactttaccagtttcctcttctataaatgaggcttgcagtaatataaatcactgacacagaagccacacacagccctagacctatgtgtctagaaataattattcccttttgtatttccttcttccagggagtagggtactggactacaaaaaataggactctaacccagaagggcatccttctcactgggcactgtcaggtaggaccctggatttgttcactgaaaggtcttgaaggcctggcagtctcggtggtgggtaatttcaggtgatgcctggtcaaagttcccccagagaagctactaaagacggagcattctgtgtcaggtactgtaactgctctgtgcccatttgagtgccctcacaaaaaccccataaggaggcactgccatcaccactcacaaaaacctcaagagagtctaggaagtgcagcactcagcacagcactggagagcagcacctgaaacaggggtgctggctgctggccttggtcctcccaccgtgtggaacgccacaggtgtgggcttcaagactctcctgtttgcacaggacaccagccaagcagtcggctgcctccctccccacaactgtagaagataatgctgtcaaaagcaaagcctcttttgaaggagggctgccgagcctcactaaggtgggagctgctgacaggcactcagccctgtgaggctcgacaggagcccctcccaatgcccccgctacctatggctgattaagatctccccccaccagtcgggcgttggtggtgcacgcctttaatctcagcactcagaaggcagaggcaggcagatctctgtgagtttgaggtcagcctggtctccagagcgagggccaggataggctccaaagctacacagagaaaccctgtctcgaaaaacaaacaaacaaacaaacaaacaaaaagatctctcccaccacatgttgagtgttttgcctatgaatatgtctatgtatgatgtgcttgcctggtgtctgaggaggccagaaatggatattggatttcctgggtctggagttacaaatggttgtgagctgtcatgtgggtactaggaatcaaacctgggtcctctgaagagcaaccagtgttcttaaccactgagttatctctctagccccctggtaaaaattcttgtatattctatttaatcaccattgaacctaacaccccccaaccccaccactgagtccagacagacatgtaccactctgcagcagctgagacaaagtctttgctctttaactctggtcctttcacatactcctaaactaccacaacacctcagccagtgcatccctgagattccagctctgccttacactgcaccagtttgttctttagtaaatgatcaagagtccctctaaggagcttccctatcctctgcaccatggagctcccaatcttaagattcttccactagagaccacataactcagtgggtagataggtatcttccatgggatctgagatgaggtaggagggcaaaaaagctctttattgtaagtcaatgggataaggggctctgtctgcttatggaaacctatactacaagagtcagtaagagaaacacgaaaaagcaaagtgctttatccactcccacatagtccacagtgagcccactcacctggaatgcccgccttggcaatggcagctgctgcgtggtcctgagtagagaagatgttgcagctggaccaccgcacctagaaggaccaggaaaacaaggctgttggtcacgggtggctatgaagaaacagggaaaagaaagccctgaggccaagagtaaaaggctggtactctgggcaagtgaatagctagaagccaaagcagtaaaaagataccactagaactttaaaaaaaaaaaaaaaaaggcaataaatcactgagccaggcatggtggcatacctataatccaaaaactcaagatataaggcaggaagatcagagttcaaggccagcttgggctataggagaattcccggccagcccgagttatgcagtgagattctgactcaaaacacatacaaataaataaacaactagagagatggctcagcagttaagagcacttgctgctcttgtagaggaccctggttttggttcccagtatccacagtgtagcttacaaccagtaccttctcctgggctctgtgggcaccaggcatgtatgtggtacacatacaaacatgaaggcgcagacgaaaccctcacacacacaaaattaaataaataaaacgttactctagtgctatgtgaacaaggagacagggaaggatctgctaaagcaggctgcagagaagaaatacagcagcaacggtggaagtgatgtgtggctgtcaaatactccagggtcctcatgcagggagaatctccaggctagacttgccatttagtgatggatgtagcggacttcaggatgcagagggtagaaagtttgtttggacttgttcgacatgggatgtgtacttgatggccaagaggcttacatcaatacttagatgtgagaggcttgtacatgagtcatcaccacacaggcagtatttaaagccatgaaatcagatcaccaacaaactgaatgttgaaaataaaaagaatgggagctagagatacagtggttgagagcactggctactcttccaggacctgagttcaattcccagtcccacatggtggctcatgaccaactgtaactccagttgtagggaaaaatgacaacctcttctagcctgcttgggcactgcatacaagtggtgcacagatgtacattcaggcaaacatccatacacacaaaataaaaacaaatctaaaagaaaggtcaatggaagtaaaatcccagtacttggaaggctgaggtagaaagatagcttgagccttgcctgaacaatacagtaaattccaggacagcctaggctacagagtgggatgctagctcaaaagccaaagaggccctcaagtttctctgccacaggtgttagcagtgggaaatggagagaaaaccagctaggtctcccaaccagtcctcttccatggctgaacccagagagggcaagggactcaaaggagtcacacggctgtggacctcacctccgcacccagggccacgagagtctcaatgaggacagccgtctccacagtcatgtgcaggcagccagcaatgcgagcacccttcagcggcttggatgccgagtacatctcccgcatccgcatcaaacctggcatctcattttcagctatgtccaaggcctttcgtccccacgcagccagtccaatgtccgctgcaggaacaagatggagagagagttacacaagccacctcctcccatcaaccatgaagcaccatcccggtgtaaagagtgatccaagtgtggccctatagcccttaggctgagcaatctgccacagcattctgtgactcacaacaaagagaagcacaaatgcctcttggaaaaacagctgagactgaatcccactgtcaatcgttttcactggtgtaccaacctcaaacatcgatcccctgggaaaactcaaatccagcaagtgtagtaggatgggcctggggttcatggtgagatttgttttaactattattttttaaatgaaaggacagtggtctttctttttatgtatgtgcatgtatatagaggtcagaggccaatgtcagtgtctttctcaatttctgtcttattttttgagacaggatctcactgcacctgaagctcactgatctggctaggtagactcccctcctgcctttgcctcatcagtactgagattataggtccttgcagctttacatgaactcaggttctcatgtttataaagacaggcaaacttgccaattgaaccatctccccagtgtgtttacctttggggagcttaggtctcactcaccctaggaaatgaagggtgaaggagaaagaaggctgttacagaaatcttaataatttaacaaatagttaaacatgccaggagtggtgtaccatacctgtaattctggtacttgggagatagaggcaggaaagtcatccttgactacatagcaagttcaaggccaacctgggctacatgaagccctgtctcagacactactgctgctgctactactatgaagactttattattattctgcttcctacactgcattaaataatttcaaaggagcagtgacagggtgtgtccaagaccctgatctaccctaccaggggttcaatcagcaatatacacagctcctcatctctctctctctctctctctctctctctctctctctctctcctctctcctctctccaggttatcatctggcatgtcttccccctgtacattcccagctccaagagggaacagctcagactctacaccactgatttttatcaatttctagtgtcttttaccatgcccccttcagcatctccaattctttcgtccagtttaggatacctctgtccatcccctgctctcttagcctctgagacctcacttagcaaagctcatacccaaagcttgggtgggtggcttcatgcctgtaatcccagcactagggaagctgaggtaagaagaattgagttcatcctgagcttcacagagacctagtctcaaaaacaaaacaacagcaaaagccaaagtttcctcctagttagagccagctcttcaatgtagctaaggcctgaactggcaggagaatcaacaggcatgggacaacagtcttgcctactatcaacataaaactcaagggacacctggcacatcccagcaaccctactacattttcctaataagtttatccccttctcttctccccagtcatctttcctcatcgactgataacattacttgacaatttactttctgtccacggactccatcctcatctgtagttagactaggcattcttgtctgtcgaaaaggataagctgtccctggtccctgattttctcatcccttaccgttctattctgggtacccctggggtaattatgctcaggtttctcacaggagcagagacctcgctaacgactccatcatttctgaaatgtttgcttttccttggcatctgattctctcttctccctccttccttcctagctgctcttcatctgacacattctaagagcccttggggacccatcatcgctcctctccaaactcctgccaaataagttctattcagatgactgtgaacaccttccccatggtgataactcccaggtattgacctccagtacaaacttctcccaggaatttgagagtcacataatctaactgctgactcagcaactctagactggtgtccaactgtttacccatcaagtatgagccctcaagactccttagccacacacacccagtcttcccattttaggaaatgaaaccaccattcaatcaacttgctggccaaaagcctctaagattttatttccatttttgcttgccatcatgttttttttgtttgtttagttggttttggtttctttgctgctgttgtgttactgtttaggggtttttttgttttgttttgttttgttttgtttttgagacagggttcattatgtagctctggctgtcctgaaacttgatatgcctcctgggtgctggggtgaaggtatgggccactcaacatgttttgactgagtatctcacccttgtctaaagcacttctcaggtgggccgacaaagcaactccatggtcccctctgttcccacatttcattacagaccagtgggaaacctaaaaattttaaaacctaatcctgacctgggcttcaggccccaccggctcctatctccaccttgttccccttaccagctgctcagccacacagggctttaacacaagtcaactcatcagatgcagtacctggctcagtctacgctcaaaacacctggaaatggaggggctggagagatggcttaacggttcttcccagagtaacgggattcaattcctaacagctcatggacactggcagagacgctataactccagtcccaggggatccagcactcgcttctggcctgtgtgggcagcacatacacctggtgtatagacatgcaggcaggcaaaacacccacacacacatcagggacattaagatgaatcgggacttcacttgtagcggggtcggtcatctagcttcaaaagaggtatttattatcccgtgaccagatttgtcttttcaaagatcccactggccaaccataatgacatgtacctataaaaacagtgctgtggaggataaaggaagatcttgaggcccaaaaaacaagcaaacaaaatggtagcatgaggaccagagacctgtgaggagagatgagaatgggggctggtagcatgaagagtgaaaagtgacagatctcctcacacaaatagactatgctacactacataggcctatctgtcccaaccttgtacctgggtcacttttatatctccagtaaccagcagggcctggcatagagaaggaaatcagaaaatgttaactgaccatatcatctgctaaaactgattgagcaaagattcacaaagggttgaaacagggcaaggatggtgaaagaaagaaagaaagagaaccccagcatttatggtttccagtcagaggcagggcagatggtggtcgaggctgctctcaaggccttcctgaaaaagaccctgggttttgtgccttcctgcttaaactccaccccatctactatcgcttgtccctctagctagaaatgactctttcaatggcattgtggcagctgtgccagttccagagctctcagtgggactttcactccagagggacaggaggagctagtgtaccaaactctggagcttttggtgccaagagaaccagagggctaccgacacctgtcaaaagagcaagccaaaaggcctgtgtgacccttcctgaacctgcttcattagactaagaataatcagcctgaaccttactgtacacccaaggattatagaaaacaccaagtggacaaggtctggcatacagcatgtccttcttaatggatctccacccccacacagccaagaacccaggttccaaatccagccttatctctagccactcaacatatggtcctccccaacccctccacagtatgacaagcctacattctagctgttccaccaagacaacactaacttaaacctttctgggcctcagtttcagtatctccccaatagagacaacaatctactctgatagctgatgaactcccttaagttcctcctccctataatgggatagcatccatatcatgctggtgactctctccaacctaatggggtcttgaaatgattttaaaagctagccagactgaattgcttttttttggggggagggggagtgattggtttgtgattttgttttgatagtgtctccttattttgtccaagttggcctgaaattcactgtatgcccaggctgacctctgatggatccctcagcctcagaagtgagtgctggattacaaacttgtgtcactaatcccagcctgaactgaatttcattagtgtgttcccttgcatacagacagcagtgaaagggatgacgtattgggtccaaattctaggtaagcacttcccagttgcaagattctggaaaaaataactcccatacctctgaatttttatcgtaaaaggagaatcgttctttccccagggagctacagtaataaaacggattagtctagaataatggcagtgcctatcccattgtaaacgctcaactgaacgttgtttactcagtcagccttctatcactggaacaaaacgaagggtaatttctaaccactccaaattttcttctggccttccaccagacaaccccacagactgagctggccccaagtccccagtgcaccagggcttgtcttccaggcctctcctcactagcacctggagcacagtgcgctctccggccaccctcaaggcccagaaggcggtggacccttgttgggagccacacagaccaccagacgccagcgcaagagccgcgagggcagcttcccaagggccagtctctcaacgagaagcacgctgccgaagcaaggatcatagcccgcgccgccgctcggggcgcctgctgcggggcacggtgggacttgtagtccgtggctgcttcccacagctagctctctgcggcgcgtggactccaacccccaggcacctgcaccgccaggccagcgattctagggggtcccgggcgccccgaggccgcttcctcgaccagacgccgattggtacggccaacaaacccagggcagggagtcgagtcgccgcggaggccagcaccctgggactcaccgactttgtagggcagtttatcagacatgttggcggcgcttccgctaggaatgacgaactcagcgaatggggccggacggcgcgaggcagggatctacgcctggcgcccgcgtctttaaatatcttcttatttgaatattcatgagtcccgctagggctgagacttgggggcggagcctagctcgaggtgaagcgctgagccgccgcagggctggacttcgatccctaccacagaaattatacgttttatgctctgtagcctttggacctctggcacccggctggaagggagcatggagagaggcagttcttctcccagcaagtgaaccagaggtcaaaataatgcagaactttcaggctctaggcaatttacttcctgagccttatttcttaaggtatcaatgggctgaagactgactaccgcactggatacaagtaaagagctgtgatacatgcctgtaatcccaacactagggagacagagccgggaggattgccacaagttcgaggtcagtctggtcgacagctagttggttccaggccagtctctcccctcttctttctttcttttctctcttctgtcatcccccctctgcccaagccattatgttgtccagactagccctgtcccacttcaaacttgagatcctcctgcctcagcttctcaagtgctgagattacaggcttgggccaccatactgggctaaccttttctcctagtaaattgattgtctggagtattttgttatagctatggaaagctgactaacacagaagtattccttcttctgttttctagatgagactatacagaacacctattaactcttttaaaaacttttatttgtgattatagggtgcgtgtgtgtgcgtgcgtgcgtgcgtgcgtgcgtgcgtgcgtgcgtgcgtgtgtgtgtgtgtgtgtgtgtgtgtgtgtgttttatgtgcaccacctgtgtgcagctgcccttggagtccaaaagggatcatattccctggaattggaagtacagggagttgtgagccaccttaatctcaaatggaagtggaccaacctagaactccaacccacgtcctctgcaaaagcaataaccactcataacaactgagccttctctccagtctctactaactctctaatctttttgttttggtttggtttttgttttttcccagacagggtttctctgtgtaacagccctagctgtcctggcactccctctgtagaccaggctggcctggaactcacagagatcagtctgcctctgcctcccgagtgctgggattaaagacctgtgccaccactgcttggaaactctctaatcttttgaagtattccccagtaaaactatttaggcttgggcatttctttatcgagagtgttgaatatacaatcagttttattttttacaatttatttatttatgtatttctgtgtgtgcaggtcatcacagcttgcatgtaggggtcagaggacaactgagggacttggttctctccatttacttctgcgggtcccagggatcaaactcaaagcatcaggcttggtggcgattacctttgcccactaagcagccatcttgctagcctatgattcgagtcttttttttctttagagagacagggtttctttggctgtcctggaactcactttgtagatcaggctggccttgaacttggaaatctgcctgcctctgcctcccaagagctggtattaaagatgtgtaccaccactgcctggttcttaatttatttttaataacatttaaacatatttttaacatttaaagttttgctattattattattgatttgtgtatatgatgtgtgtgtatgggtacacatgcctgtagctggaattttctgtcctgccagccagctcccaaataaccacacagagacttattaattatatgtgctcagccagcagcttaggcttgttactaactagctcctacaacttaaattaacccatagttcttatccacattctatcacttggctcggtacctttcctcagcgtggcatgttcatcttgtttctccccagtctcctagtgaccctgcccttcttcatcccagagctctctccctgtccacaagtcccacctaacctcttcctgcctagctattggctctttagctctttattaaaccaatgagagcaacacatcttcacagtatacaaaaagattgttccaccataatccataactgcatcctaaatatttatccttatacccacagattggtgtagttctcatccctcatggaggaatccttacaaaagacagagaccactacagaaaattacaaccgatggaaatgaagagctgtagagcccagtccatcagcctctcactcctgcacctgaggctcagggtcatgaaggagggagcaggaccttttgtttgtttgtttgtttgtttaagatttatttatgtattgtatatataatgctctgtcttcactccagaagagggtatcagatctcattacagatggttgtgagccaccatgtggttgctgggaattgaactcaggacttctggaagaccatccagtgctcttaacctctgagccatccctccagcaccggaagaaagattttaagagccagagaaacaagaagtttggtgtgcgactgtgtgtcataggaatgtcagaggggctgcagctatgtaatttcagcaacatagctgtctaaacatatcctgaagaggaatgacacaaatggacatgctaacgtggaaggggggagctcaccaagtctcagccctagacaaagaacaggcagctaaggaaggcagagacgaggagaaatagtcttccccaggaaaaaacatgtcattgctgcttatctgatatcaattagtcagccctgaaaacatatgcatacaagtgacattatatggattgagtaggttgtatttttgtattaaaaaaggaatatatatgtatatatgcacgtatgtatacacacacatacacacacacacatacacacacacacacacacacacacacacacacacacacacacacacacgtcatcaacaattaaagaaaaaaaggccatgaatttgaagggggtggaatggcaggtggcttcttgggatggttagagggaggaaagggaagggcgaaatgatataattatagtataatctcaaaaaataaatcaataataaaaagattctcaagccagacatggtggcacacatctttgatcccagcactcaggaagcagaggcacgcggatctctgtgagtttgaggcctgtctaatctacagagtgagttccaggactgccagggctacatagagaaaccctgtcttggaaaaaaaaaaaaaaaagattctcctgtggttcagtaacttaaagttttcaagtaaccatatagtaccacacacacaaaacaaaattagatgtggtgcgatgctgtgcatctgtattcccagcacttctatggcaagatgggaggtggagacaggaaaatccctacaaatttgtggaaatttacaaagcttaagcagaaacaaaaaaaacaccctgacataaaggtagtactgaaagttgtctgctggcctctatatgtgcactgtggcttgtgtatactggcacacatacacaagcatatgagtgcacacaataataaacaaattctctgaggcttcttgttgaccagtgaactatttagacatgcgttgtttagctttgaaaggttcagacattttcccattattgttttgtcattggtttctagtttgattctattgtggttaaagaatatattctgtatggttttgtttttgtttttttgttttggtttttggttttttttccgagacagggtttctctgtgtagctttggagcctatcctggcactcgctctggagaccaggctggccttgaactcatagagatccgcctgcctctgcctccttctgtatggttttaatgcatttcaatttgtggagatttgacccacatcatggttagtgtctttgagtttctgttgctgtgaagagacaccatgaccacagcaactcttagaaaggacaacatttaattgtgggtggttcagtccagtctcatcagggcgggacatagtgcaggcagacatggacttagagaagtaactcagagtcctatgtctttccaaccaccaccgtggcaatttttactttgaaaccacttggcagatgaacctttgggcatgcatatgaggggctatttggattacattggttgaaatcagtttgggaaaacccattttggttgcaccattccctgggcaggtgtagcaagaaaaataaaagactcggagaccgatattgaggttcaagcttcaagcttcaagctgaagatcagaaaaacaaagcaaccagcactagctctcactctacctcagattgaaaggcgatcctggctccaccaaacctctgacagctgcctctcctcagtgtggctggagaatcctgagaattcaatgtcttcctatcttcaatgtggctggagaatgaatcctgagactgagaccctgctcctgtcttatatacctccctaatgctgggattaaaagcctctgatcctaggtgctgaggtcatctttttgtgagctgtttctcttttgtttttcaagacagggtttctctgtattgctttggaggttgtcctggaactcactctgtagtgctgggattaaaggcatgtgccaccaacacccagctgtttctctttaggactgcatcaatcttgtgtagatctgggtggcattgaactcacagaaatctgtctacctcttgaatcctgagtcctgggaataaaggtgtgtaccaccacttcctagcttctgactgctgggattaaaaggtatgtgcctggcttctatggcttgtgactaactttgctttctgaatccacaggcaagctttaataaagcataaataatataccaccacaggcaggaggccctggaactgtgtaagatgaagggatattagcatgcatgcactcctctctcctcactgagagctggatattagcgcattcgctcctctgtcctcaccgtggacgtgatgtggctgctgatacaaagctgccttgacttcctctacatgacgaactctaccctgaactgtgagcgaaaatgagcccttgatgtttctttggtaaggatttcttctatcacagcaaaaaacaaaggacaacaacccaggatgaggtcaatcttggtgcacgttttgcaagcacctgaaacaaatgtgtgttctgctgttgtttagtgaatcagcgagatgccaaagacatgcttctggctaatggtgatgcagaactctatactcttgctgattttatgcttagccattcttccaaacgaaagagctattgaaatttgtcctttccaatccatcagcctttgcttcatacattttacagaactgttctttttgcacatacacgtttaggaccgttgtgatgtcttaggggttggctcttttgccctttcataatggaaaggaaagatatgagggacagggtgtctcactagtgccctatgggagcggaaagtctaccactacattgatgtgatttgaaaaaaggtaatatttgggtttcttttctttctttcttttttttaaataagatttatttatgtatccagtgttctgcctgcaagtatacctgcaggccagaagagggccctgggtcttgaaggatggttgtagttgctgggaattgaactcaggatcactggaagagcagccagtgctcttacttgcctgagccatgtttttaaatgtgactgtacactgttggtaaggctttagggaaacagcccccccccaagacatagaatgtagaaactttcataaaccacactctggtaactgctgacaagatagcaaactcacataccctttgaccaaatagctccactttgaggaatttaacctaaagatgcacatatgtgtgaatgatgatggtaaaagtcagaggctggaaaaggcagacacagccttcagtagatttgttaagtgatggtacaatccccagggagaaatatagtaagatggctattttttaagttttttttttgtgtgcacgtacacatgtgtgagtgtgtgtgtgtgtgcacgcacgcgtgtgtgcatgcctgtgtgcgtgcgtgcgtgtgagggggggtatgagacacagcattcatgtggaagtcaagggacaatttgtagcagtgagtctctccttccaccatgtgcgttctagggattgaactcagatcattaggcttggtggcaagtatcatcacccattgaaccatcctataaagactgccagtgtttaatgggagatgtttattaatatcgaatttcaaggtgtgttacataaagaatcagaaacaacaatgtagagaacaagtgacctataatgctattatttatgtaaaagaaaagggaacaactgggtctggcagcacacccgacacttgagagtcagaggcaggaggatcagaagttcaagggcatcattaggtatataacaaatctgaggccagcctaggctacttgagattctgtctcaaggtgaggaggagagggggagacacagacaaactgggatttacctataatcacacatgtaccaggctagatacaagggactgctaacaatgccagggaagtgggacatgggctccagtgaaaagcataatgacttagacttcttcctctaaatctgtgctccagggatgcctctggcaggctgctgggctcccaacccctgggcagaggcaagctgccccctccacttgccctttgcaccccctttccctgtgtgctttttcagacactgagctccctgttccaggggtggggagagcaggatctctgctattggttaagggctgttccaggccgtccactccaaagcatcctcacttgccttcctatgctccagcctctctctcactgtgggacaaaacaagggaatgaggtccaagtgttgaggacacctgctgacatcaggagacgggctgaactctgaccttctgagatgaccccaccaccaccactggtctatccctgtccagagacctctatcaccttctcccatgaccctccctccaggtcccctcctgggtgtaaacaccctctggggtctgccttgaggtgtctgatgccatgtaaccatcttccagtccttgaaatagttattctccctcctacctcagcccttctcttcccagattgctgtaggtgggtgaccagagttccagaaactgcctttacagggccagctacagactcaaccgctgggagaccacactcctctcctcccagtctgagcttcagtctgtccacctgcaaaatgggtatagacgtaacggtgtctgaactgtgtatatggaatgtatgggggacactttcgtaacttacccaatgacatgtttgtcccattagcagaaaagtcagaaatgtgtctagtttggccaaatgttcattctccaagggtcagttcagcgtgtgatacacggtgtttgtgaaatgactcttcctgaccattgccccagcctttgcgcttccggtctgatctcaggtgttcctcgagttgnnnnnnnnnnnnnnnnnnnnnnnnnnnnnnnnnnnnnnnnnnnnnnnnnnnnnnnnnnnnnnnnnnnnnnnnnnnnnnnnnnnnnnnnnnnnnnnnnnnnnnnnnnnnnnnnnnnnnnnnnnnnnnnnnnnnnnnnnnnnnnnnnnncggagggaggggggaaaagggaaattttgcagcagaatcttctgtagctcagactagtctccaacttagtaggcagctgaaggtggccttgtactcttctacagatacctggctctggcacaggctgagaggctcatcatggctcctgcagcaatgctgccatcggtaggctgccccccctcctcacttctcaggcgacaaccctgcaaaggagtgcactggggatttggaacaaggggcttggcccagtttgatgggcaaggccgtctctagaacgagtttagagggaagaaaaaacaagaaagcaggtggctcttagtcgggaagctttaaaaccatccccttcagcctcctctgccctggccaggctccttataaaggagacaccccgcgctggtggcgcccttgcacctgggaggtcagccttcttcaggctggagtcacctttaccctactccgccaggcgagggcgctctgcacccatctttggcttctgacggaggcaaactcctctctcctgacaagtgcacacatagcttttcatggcctgtcccatagaaaaaatggagggtggggaaaaaaaggatggcccttccttgtcaatgacctttaaacttgttctgaacgacttgggcagaaccaggcactgattgtgacaccagttatagttgtcgtttgttggatacatctttgctctccacgtttttttgtgttttttgttttttcttttttgaaagaggatctcaatgtgtaggtcggctgccctggaactgactatggtgtaaaccaggctggcctcgaactctcagagatctgcctgccccacctgcctctgcaggtaccgccagactctgccattctccacggttctaaactctttagtctgtttgtaaggtagatgtacccatttacagatgaaaaactgaggcccacagtggtgatttgccaacaagtaagaagcacccacaggcgtgggggtagctagagagatggctcagtggttaagaggactggctgcttcttctagaggtcctgagttcaattcccaacacctatatggtgactcacaatggtctataactgtagtcccatggaatccaatcctctcttctggtgtgaagatgtatgtgcagacaaaacacccatatccataaaatatgtaaataaagcacccaggaaaccaagtgtgggggcccacacctttaatccccgcaacactcaagaggccagcctaatctatagagccaattccaggacagccggggctacacagagaaaccctgtctccacaaaccaaaataaactgattagttaattaattaaaacaataaaggaggcacccatgctgtttgaccccagagtcaaacagtcccagctaactcactctgctcctcactctgccatcataccatataattttcatttgaaactgtcagatgcaaagatgtaaaagaaataagacaaagtccctgttccctggacatttttttaaaagactttatttatttattatgtatacaacattctgcttccattcttccaccagaagagggcaccggacctcgtgacagatggttatgagccaccatgtggttgctgggaattgaactcaggacctctggaagaacagtcggtgctcttaaccgctgagccatcatctctccaacccattccctggacattttaacaaacacgtgcatttacacataggaacactcacataaaactcccttgctcattcatagacaaggttagtccgggatctgccccttactatcagcctgcttactttgctttgttttgatgtgatgtgtgtggtgcatgtgtatgtgtgtgatgtacacatctgtgtggctatctgtgtgtgcccagcatgtggaggccagagggggcatcctgctttagcattatgccttagtctcttgagacatggtcttcacctggagtcccccgacccccttttctggcttggttggctaacaagagctagcagtcctctccatgacttgccacttgctctgtagttgcttcagattctcgtgtgtgtgtgtgtgtgtgtgtgtgtgtgtgtgtgtgtgtgatatatatattctctctacacctgactggggctgatgctggcaggcatcatctctacattcttgttttgttttgttttgttttgtttttttgttttgtttttggggggttttgtttgtttgtttgtttgtttcgagacagggtttctctgtggctttggaggctgtcctgaactagctcttgtagaccaggctgttctccaactcatagagatccgcctgcccctgcttcccgagtgctgggattaaaggcatgcgccaccaacgcccggctccatctctacattcttaagaccgagtgcccccatgcctcttggattcagtgtcaccaaggaaattgctgatctgccaaagaactctccggtaaataaaacccacctctaacgatggtattgtttggtggggttggtagttgtgtaaaatgtatggtacatgcctccagattcctcactcgagtctgatgctcaaaaggctctgaactccttcagaccagaacccaaaccttggggcatctcttcatcactgtatccagcagagcctaaccaggacagctacctggtcaaggcttgtaaataggaatggatgacacatagattgagcagaggtcgtagcatagtggctgttgggatgttggccccatagttgttctctaatgtggtgggcaagcctgcaagcttccttctctggtgatacataaggtctctaggccaacatcagcccccaccctttgtatgcctatataaacccctcaccaatgttcttgcaagatcttagcccaaccacggaaggctgagctgggtctgaggaagggtaagtgtactgctcacccgttccctagccttccaggatcccagagacaatcagattcagcagggagcctagtcaagcaggaacttgtttattgtgccccactgcaagcatcttttaaagggaaaaaaccacagagcatggaaaacagccaaataataactttaaaggtcaacctatcatgagtctaggcgtcctatgctttacctagtggacacgagctgttcatgtagtgtctcatctggttcaatctaggcaaccaatcatctttttttgtaaaccactcaatactcacccatctgacttctcctcagtgccatctttgactggctcgtgtgccctacagttctctctgtggcccagaatcatcttgatgaacacaggatggcactctcatttgcatggtaccaatggagctctttgctcctgtaccagatgtcaccatattgcagaattccttgtgttagtatgatttgcctatcttcttgttggctgtcactcttgttaccagcaagtcacctctcattttttgctccttctctgacaaaggggagcctgctcaatcaaatctcaaagtaggataaatgagaccctgtatggggaaccactgctaataccaatttccaggaaccaagatgatttctagacttgctctggaaatacaggcagggatggtgttgtgagttcaatggtgggcctctgcctaaagatgcttctagcatttgtgactgtgactttacctgggagaaaaaaacctaaatccaatttaaatgtccttataagagaagaaaaaggaagagtcacacagtgaagaagacagagggaggttggagttatgcatccacaggcaaagaatgccaactatatcagctacttgtgaagctcatcaattccctcgctttttttttttttttttttttttttttgggtttttttttttttttttttttaagattttatttgtttattatgtcttctgcctgcatgcaagcagagggtaccagacctcattcaaggtggttgtgagccaccatatggatactgggaactgaactcaggacttctgcaagaatagtcagtgctcttaaccactgagcaatctctccagcccagatagggtttctcactgaaccaggagcttgctaattcagcttttctggccagccagcaagtcctggggtctgtttctgcctccctggtgctggtattataggcatgaacttccatccctggcctttaatttaggttttgtttgtttgtttgtttgttttttatttaatgtatacaggcgttttgtctatctgtataccatgtgcatgcctgttgcctgcagagctcaccggggacatttcagaaccaaaaagtaacaccaaggcctgccaacagtcgccagaactaggagagaaccttgggacactatactactcctacacatgattgtggacttacagtctcaagaaacgtgaaggtagtgggcaatggtggctcatgcctttaatcccagcactcagggttaaagagacagaggcaggtggatctctgtgagtttgaggccagcctggtctacagagtgagttctagtaagtcaaggctatacaaagaaaccctcttttaaaaaaaggaaaaagaaaaaaaaaacgtgaaggtataaatttctgctattttaaatcaccagggctgtgggctttatcttggcagccctagaaatctaacactgctgggaagtggggagtcatgggtagacaaggaggaagctaactggtgactggtgattcagtgtcgcttgttctgtctcttgccaccacttcccgtaaagaaagctaagttgatggaggctacagtgagacttgctatgtcatgccaagttctaaccctaggattccagagcctcctgggctgtgaatcacccatgagctgtggttttgctttaagcaactgtgaggaagtgttgtcataagggcggcactctgagaaagaggtaaatctccaggccctgctagtggaggtgcacatctggcattcattccacacagggtgcctgggtgccttgtagttgcttcttccagaggaagtaaagactgaagcattgacctggaagaacaaagagaaggaagtaagcctggggtgtgtcccctaaggcaaaaatgatgagagagggttggatcccgcatctaaatctgccagttttcttttgtcccttgtctatctaacaggatctcgtgataacagggttgcgttaataattcatatttcagtttcccctttctaatagagcaaagctgtgaagtggagaaagggtaacaaaaggccgtggagaaggacactgaaaggtcatccagaagacctggatcccgaaatgcaaacatcggcggtctccttaaatccacgcatccaggaaggtgttcataacctcttctcaagtggccagagccaggatcatacagcataaggatgaagctgccctctgagcatgcccatatacttttctttcttggctatactagggatccatgctagcccaaatgcaaatctgtctttcaggagccattccacctgccacaagtcatttttttccaggtctaaagcagaggtggactctctgggttcatttccacctttggataaaggacagtagtgtagacccctagtgctgctgagtaagtaaatgaaatgatgaatgtaaattctttagtgccccatacatacttggtattccattttgaatcattattgttgaggggagtcccatgaaacccctctatagagggtttttccgaaattacttactcgtggcagggttgtgaaaagtaagtgcaggtcagagaacaacttgcaggtctcaggacttgaaccccggttatcaggttgtcactgaaccatcttgatggccctgtctataggatttttgagcttctatttagtacagagcctctagcctccctccaacagggaaatacaaagccacgctggacaggttgtctgagagacgacatggtagcattccaggcctgcactgcatatgggtcctgcctgttccccagtgtgggtgatgcaggtcctaggatccatgaaaatatgacagctgagcaccccagagcactttgtctgccagacccaagtccagagcttggtccctagactcactcaccttatctggaatgagtatgtggtggccaagcaacaccacctgacctcatcaacctagcagtccagagctcactgtggtggcagaggaaggtcagaaggaaaagaagttcaaaatccagttctgcaggggctgcagagatgactcagcagttaagagcactggctgctcttccaaaagacctgggtcaggttcccagcaccttcatgatggttcacaatcatctgtaactccaaagggatttgatgcttgtttctgtgtttctgttggtttgttttgtttggtgtgtgtgtgtgtgtgtgtgtgtgtgtgtgtgtgtgcgttatgcacgcactggagaccagaggaagaaatctgatgtcttcttctatcagtctctactttattccctggagacaaggtctctcactttgcttggcactcttccaggtttgggctcagatggcagtcagcaagccccagagaccctctgactctccaccctcagagtgttgggtttacaggagcactggccatgcatgggtttttgttgttgtttgagcgtgttgaggcagagtttcactatggagctctggctaacctggagctcatattctcctgtctccgtcggctactcagctgggtttacagttgtgcactattctacctgacatcaactgcttttcattctttagaaccaaaatgatcctaatttatcccgtctccctcctcacatccaaacgccagctctttacagctctgtactattcagtgactttccctcctgccctgcctctcctggcctcctcttcatttactgcagactggctcctgccctgtgctcttcttgtccctcctaagccctcccatccccttggacaattgtcatttcatgaggttgaccactccctaccttggcctcttgactcctcacctcctgaccaccccttgaccttcaccgccacttcatatcatcccctgtcctcagtggccacaccttggaccttatcctttcttcactgacacagaagtttgctacaaattgcctaaagtccaactgtagaaggactcagcaatagaaggatgtcattctcccagatttacaagaatcagtacttggtgggctccaggtacatcaattcagtgacatgtctgtaacttcaacaactacccaggttcttctatctcccttttctgctattctcaggcattgtctgggtcatcagactggcttctcacatgctcagcagatagttactgaaactgaaataccttatcgttaggactgtgtccaaaggcaggaacaagggcctcatctttcttctgccactttgtaacaaggaaggaaaatctccaagccagcatagaggtgcacactcatgatcccagagagtcaagagtacaaggttattcttgactatatctagttccagaacagcctgggcttgtatgagacctaatttcaaagaaaataaattttcttggatgttttctgactccaactctgactgcctatattattatatgtgtgagtattttgtctgtatgtagtatgtatgtgtaccacatgtgtgcagtgcccatggagacagaccagaagaagatggcagatcatctgggccaagaattatagatggttgttgttgtggggtatccaccagaaaagactgctaggacatggatgtaagataatagaaagtctttattagcctgcctatgtgttcaggatcccagtgtagccccaagcctttctcagagtgagattttaagcacaaaaccatatcctgagttgacatatatcagttaacaggaacagttaaccagaagaggaactacagaggccaaaaaacaaaattggtacatttagagactttcccagaactttctcaggctttgatgaattgggtcttttagttttggcaggtggtactgtctacgtgctgagttttacagctgaatggtacctccatcatggagtcatctatgctaaggtcttggggggcttggtaggtctagggccctgttatagttgtcagccaccatgtgggtacagtgaaccaaactcatcaggtcctctggaagagtagcaagtactctaaaccatctttctggctgctctctctctctctctctctctctctctctcctctctccccagagtcttatatagctcaggttggcctccaactcacaatgtacctgaaactggccttgaactcctgatcctcttgtctctacctcccaagtgctaagattataggtgtgatgacctcgcccagcttttcctatttcttccctgctagagctggtttttctaagaagcccaggctgaactcaaaactctaaatcttccacccacatatcccgagtgctgagattataggcctgtgtgtcttagtcactgttctattgctgtgaagagacaccatggccatcaaggcaactcttataaaagaaagcatttaattgagggcctgcttacagtttcagaggttagtccattatcatctatcatcatggtgaggagcttggttggaaaagtagatgagacttctacatcctgatcttcagacagcagaaagagaacctgggcctgtcatgggcttttgaaaccttgaagcccacccccagtgacacactttctccaacaaggccacacatcctaatccttctaattttttcaaatagtgctactccatagtgattaaccattcaaatatatgagcctatggggaccattttttattcagaccatcacaccatgctctatgcaaggatatatagatatagatatagatacatgaacaaatgaccaaagtcatgctgggtatgttccaaattttatacttttcatgaacacactaagatctccagttggcaagatgaaagttagaaagagctttctgcagctagagaagtaattcaacaggcagagtgcttgcctagcatggtcacatatagataattaacagcaaactcaaggtcagtctgtggtgcataagaccccatccaatgggtgctgcacaaatgctcagcagttaagagcaccagctgctcttgcagaggacctgtataaggttctcagtatctacatggctgctggggatctgatgctgtcttaggcttctattgctgtgaagagacaccatggccatgacaacaggagcacatttaattggggctgactttaagtttctgaagtttagtccattatcatgacaggaagcatggtggcatgcgggcagacatggtgctggagaaagtagccgagagttctagatcctgataggcaggcagcagaaagagtgacactgggcctggcttgagcttctaaaacctcaaagcccacccaccatgacacatttcctccaacaaggccatacctccaacaatgccactccctttgagtctatgcgggccattttcattcaaaccaccacagatgccctcttctgactccatgagcacttcatacatgtactgtaaagacatacatgcaggcaaaacaccaatacacataaaatataaatatataaaccttaaaagacaaacagaacaaaacagcaaaccaactttctagaaaaatattggcaacttcagtatataagaaaaggagaagaaaaaggaggaggaggaggaggaggaggaaggaaggaaagaaagaaagaaagaaagaaagaaagaaagagaaagaaaaggtaatgattccttagctggatggcggtgaatcatacttttaattccagtactagggattaaagaggcagaagcaggtagattgctgtgaattcgaggtcagcctggtctacaaagctagttctaggatagccaaagctaccaaagaaaccctgtcttgaaaaacaaaaacaaacaaaaaaggtaagatcccctacccagtgcaccatcacagcctgccttaggaaacatccatgtagatataaagtagtatgtacaaggatgtccactttaataacattttttaaatatttgggttttttttgtatttttttaaagattttatttatttatttatttattatgtatacaacattctgcttccatgtatatctgcacaccagaagagggcaccagatctcattacagatggttgtgagccaccatgtggttgctgggaattgaacccaggacctctggaagaacggccagtgctctcaactgttgagccatctctccagcctcaataacattttttaaagggggaaagatgggcaggaacctaaatacatgccagggaggaagaaatgaacaaattgcttccattttcaaagtcacttaggtcaaaagtgaactcagttcaaatgctgctccacccactagcgagatacaccatccttcatttatttggcagggttgcatcctgagaaattcatcatttggcaattttgtcattgtgcaaacatcaaagggtacttatgcaaacatatatggcatacatatggcagccacgcaacatggcctcttgatggagttgagacattatagaaacaagatgaaagaggctttgtcagtgtaacacagtacagttttgtttttcctgtttgtttggttggttttttgtttgtttgtttgtttgtttgtttgtttgtttgtttgagacagggtctcatgtagcccaggttagccttgaaatcacaatgtagctgaggatgactttaaattcctgatcttcctctcttcacctcccaagtgctggaactgcaggcctttgccacaacgccagcctacagcctttgttgagagcattgcatgacagtacccaccaatcaccagagaaaccaggaatgttaagcacacaggattgtctttccaatgggaaagatgaaaaacctgttcttccacccagaaagctgagaattggaaatgattaacaacctgatgatctgtgttctctgttgggccaggccacatcaagctcttacaaccaagactgggaggtagctagtaatctaaatgaccctgatatccagaggttcccccaagctcccacactaggaccagaggtggctaataaccaaaatgagctctacattagctatatgaccaagaccaggccagacccttaggctgtaagctcgtttgggtagcctatctccagaacccatcttcttggaagaaatgacatataccccgaggggagtttcaatgtaattacacttctttgtgcactaaggattgtattatatcaggaaactttttacccccaaattgccctgtacttaactattgggaaaaaaaaaactgtctgttagtagacaccccacccccgaagtctgatccaggctgatgaagtcaatctgcacctggtttttattcttgtcttttcctgatattcacttccccgtatgacacctgcagggacccccatgagcattctcttctacagtgaatcttttttgtttattttttttgtgttctgagacaggttttctttatgtatccctgcctgtcctggaactcaccatgtagaccaggctggccttgaattcacagagatcctcctgcctctgcttcccgagtgctgaaattaacaatgtgcaataccacctcccagatacagggagcccttttttaaataagatttttttaaaagattttttatttatttattatgtatacagtcttctgcctgcatgccagcagagggcaccagatctcattcaaggtggttgtgagccaccatgtggtttctgggaattgaactcaggacctctggcagagcagtcagtggtcttaaccgctgagccatctctccagccccttatataagatttttaagacccatggtttattgtctttatcatgtattgtgtactacacacaattgtactgctgtaatgttttatgctggcaatgcagtggatttacaacaggaatagcacaagaacagagcagtgctgtaacagtaacaggaactacagcatccctgggaaatgggaaatttccagcttccttataattttaaaatattttagatttgttcattttatgtgtatgagtgttttgctgacatgtgtatctgtgcaccgtgtgagtgcctggtgcccatggaggtcagaagagggtatcagatcccaggtcctctgtaagaacaaatgttcttaactactgagccacctacctctccagctccaactatatatgtatatgtattgagattaggcctttctatgtagttcattgtcctagtttgctttctattattgtaatatttggtgaccaaaggcaacttggggaggaaaggatttatttcatctttgcttgtttgcttgcttgtttgtttttgtttttcgagacagggtttctctgtgtaacaaccctggctgtcctggaactggctttgtagaccaggctgaaactcacagagaacctcctgcctctgcctcttgagtgctgggattaaaggcaggtgccaccaccacctggctagcgtttatttcattttacagcatccatcactgagggaagtcaggacaggaaatcaaggcaagaacctagagacagaaactaaagcagagaatatggaggagtgctgcttgctctccatggcttgctcagcctgctttctttattattattattatttatttgtattttgtgtacattggtgttttgcctgtgtaaaggtgtcagatcccctggaacaggagttagatacagttgtgagctgcatgtgggtgctgggaattgaactcaggtcctctagaagagcagtcagtgctcttaacccactgagccatctctccagctctcagcctgctttcttataccagatgaccctagcttgtgtcaaattgacataaaactaaccagtacatccatgctgctctaaaactggaaatctccagcctcagtctctcaagtgctggattgccaccatgacctgctttcctttataattctaagggaccactgtcattttcttcattggtcaaaatattgttatgtaatgcatggctataaacctctccctcttcccctcttcccctctctctcttctctgcctgcttctctccctattcctccctccccccttccctccctcccctctctttctcatagtgaagactgaccatgttaggcaagtgctctaccactgagccatatctgcagccttcttcatctttaaaatgggtaaaaatgatagtgaccagttgatagcgttgaaatgagacacccatgtgaagcagataggaaggaaggggtctcataagcattgagtatattttcacaaccccacatagtaaggaatactgagtagcaatttaaaaggtatgaattcaagggctggagagatggctcagcagttaagagcactgaatactcttccagaggacctggaagtacccactgtacacacacacacacacacacacacacacacacacacacacactaattcaagctgggtggtggatttctgagtttgaggccagtcttagagcgaattccaggacaaccagggctacacagggagtctttgctcaaaacaaacaaacaaaaagtactacacccttagtcttagcactcaggaggcagaggcagaggcagaggaggcagagaggcagagaggcagaggagaggcaggagacaggagacagaggcaggcagatctctgagattgaggcctggtcttcagagttcatttcagaactacacagagaaatcctgtctcaaaagaccacacacacacacacacacacacacacacacacacacgcgcacgcgcgcgcacacacacacactattgtactgccgcctgctgcctattgggcagagatggaattacatttctctttgctctgtcttttctttcatgatcctaaacaatctgttttagaaagggatggagctccctcttcacaattcctatagggcttaatactagggagaaacttagaaaactaaaggattatgggggttggtaaagtgcttgctatataagcgtgaggacctgagttttcgtatcagcgttcacagtaataaaacccccgagctgggcagtggtggcacacgcctttaatcaagcacttaggaggcagaggcaggtggatctctgagtttgaggccccccgatctacagaatagattctgggacagccaaagctacacagagaatccctgtcttgaaaaaaccaaaacaaaaaacaaaaccaccaacaaagtagtactcatcagtagccccagcacatgggcatagagacaggtagctccctgggcacacttaccatcaagtgtaactccagtttcagcaagcaactttctctcaaaaaataaggtgaagaagacagagaaagatacttgacctctggcctccatatacatgcatgggtgagtgcacgcatatgcacaacacacacacacacacacacacacacacacacacacacacacacacacacacaaaataaatctttaaaataatgatatgggtccctaagtactgaaattggaagcggcacccacaccccaatgtttgcagaatgtcactggactacggaataagggtaaagggatattcctcatgctaattattttgaagttgtttttcgggggacagtaaatgtcaaattctttcccttaaccatctctgtctcctttgttcctttgcaggggctgagtcagcctgttgggtgacccaggcctgccctaggggagggaggaagctacacaactaagtcctttgagcctctcccctgtccagagggcatcagcaattggaaaggagcccagctttatgggcaaacaatggtgccagccagctgcagggctcaacagcctggctaatctgggaggtgtccagaagggtgcccctcatacctgaagggtccacttcacttggagacaaatatccaccaatcagggaataggtcacgaagcagtttggcaagggctggggagagtcagggaccattgagagggaatccctcagcattcctggtgaacacctctcaatatgaaattcccaatctccctgctaggggacctcagtgttcctgggattgaactattctggcatatggggggagaaagcaaaggatccctaaggaactgaaagttgtttgaggtcccataggaaatcaaccacaaagctgggactaaaatccaggttccctttgacacagcaagtccacaccaggaagtgatgtttgcacaactttatgagcatgctcaattctgtgtctttgataaatgtccatctgatacagaagatagtgtctgatcacctgaccactggaatccgaagcaggatcccaagcctggagacctcatggacaagagcaatcagcagcacttgcctgtctgactgtcaaggctgtaatttggtaattgccttgagttcaaagcctgcctccaaaggctaggaagatgcccagtgggtagagggattgctgtacaagcatgagtctcagagttcgaatctccagaactcaggaaaaatccaggtatggtggtgagcctctggaatcccagctctgggagggagtagactcaggtggatcctgtgggtggggctttctagccagccaatccagtccaaaccatctagctcccagttcaaggagaaaccttgtctcaaaaatcaagtgcagaagcaattaaggaagacactcactgttgacatgaggctttgacatacactcatatgagcaggcacacccccagacacataccacacaagcacacacaacctccaactaacacttcctatgtgtgtcacctgctatgaattagtttgttgctgtggtagtggctccaagatggccatcaatgaccctgaacctcaggggtctatccccttatctagacagttcctgtagtgtatctttttccttctgtaggcagttccctcaatggcccttgcctcagggtagctatccccttgtgttggcagttccttctgcgtgaatgccactgacttctgtaaccactggaggactgtagaagtaaaagcccaacttcagagaaaaaaaaaaaaaaaaaacactggaaggtctatcttgctctcttgaaccactgtctatgtggggagggcatcagaggctgtgtactacagacaggtagacaggtagcccaatggaagaacccacacagctgtgtgttgctgtaataccacacattatgctatgaagaagtttaactggctcaaagtcctcaaggtcagagagtctgagactgaaagcccagttctgctgagggtcttcttcataattcagcaagagaagtcatgtggccaagaagcttgtgcaagtgttggaggcaggggggaggtggggctggttttgctcttagagcaaaccccggcttctgaatatcaatccactcccacaatgttggttttagccttcctgacctaataaactacttgacaatccctggaacctctcaacacaatcagagtagtaagtaaacatcaatgtgagttttagaagggtcattcagaccataagcaaatttggagacccctccaacagccaactgacttgccagccatttgcatgagtcccctgagaactggatccggaaccctagccccactcagggctctagaagcctgaagcccgtgttcacatcttcactagaccctcaggacaattctagagatttcatgttttaagctgtcagttttgtagtaatttcttatgtagaaatgatgaatgcaaacattttccttctttcctttatctctttaaatttaaattttaccagaaaatgatgtgtgtgttccattttccaataatcaaataaagtctataaatatttgtcacagttaatataaaataaataaatttaaattttattagctcattatcatgtatgtgtataaagtgtgcacgtgagtgtgcgcacaggcaggccatattgcccatgtggaggtcagaggacaactgccaagagtcactcctctccttccattggatgggttctggatatcgaactcagattggcaggcttaggagacaagtgcttttccccactgagcatctcatcagctttctttatttaaaagtgaaggtgagtatagcgtctgcttcatacacacagaatgcagatccaaacagatgggggcaatgttgctacattattaggtagtatttagtcagttaaacttttgtttatttattactgcgattgtgtgtgtacacgtgtgctcttgagtgggcacacccttctctccttccaccttaagttccagggattgaacttaagttgtcaaacttgcagagcaactacttttacccactgagcctatcaccagccccatgtggtttttattaacagagagagagcatccaggtagggccaaaggggcagcagcacctggcctcttcattttttctagcaatttcattccgagttcgggtctgaaataccccccaaacccaagcacaaggacaaatcctgcagggactctgcatcccctctctctcccctgaaggttccagtttctatcgccccaccccaacctggaacttatcaggtaattcttggctcatctgctaggaggtctatgttcaaaaaatttgctccatctcagcacttttctgggacattccctgacccctgggagctgcccagctaaggattgttttgctccttaatccatctctgggaaccgggtttaaattttaactgtactgcagatttcacactttgaaaagtttctcaacctcgtgaaccccatttcttcatctgccaaacagagagagtgaattctgcctcctggctgctggggaaagaaaatagtcaggtatgaaaactgcagagtaaccacaagatccagcagttccactcttaggcatatacccaaaagagcacattcatacaacaaggacatctgttcaactatgttcatagcagcactatttgtaatagccagaaactggaagcagcctagatgcccctcaactgaagaatggatagagaaaatgtggtacatttacacaatggagtactactcagcggaaaaaaacaaaacaaaacaaaaacaaaacacacacacaaaaaaacaatgggatcttaaaatttgcaggaaaatggatggaacttgaagaaaccattccgatcgaggtaacacaatcaccacaagacaaacatggtatgtactcactcatatgttgatttgagacatagagtaaagtattatcagcctaaaatccacactgccagagaagctaggaaactaggaggaccctaagagagacgtacatgttcccctggagaaggggaaagggtcacgatcccctgagcaaatttagagcacgggaagaggagggagggagctacaagaatgagaagggaagaagaggaaggatgcagaggtcatgagggagcagaaaggttgagtcaggggaagaatagaagaaagggtatgtgataggtagggttttagttggggaggggaggggaggacgggagggagaagggaactgggactgtcatgtaaaacaatcttgtttctaattcaaattaaaaaaaatctgaaaaaaaaagaaaagaaaagaaaaagaaaactgcagagtaagataaactggaagccccctgcagctgtcaggtacagccccgcccagcatcttctcctcacagtgggagtagcttaacactcaggctctgccatgctttgtgatacagaccagctttgtctctttgaccatgggactttcaatttctttattaggctttcagcagaacgtgcaaacttattccagtactttccttcagcagctaagccaggttaagaagaagggcttgctgttgttctgttttatttttgtttttcgagacaggctgtagctttggagcctgtccttgaactcgctctgtagaccaggctggcctcgaactcacagagattcacctacctcccgagtgaggggcttaaacgtgtgtgccaacactgcccactttgttttgttttttaatgggctaacatttgatagcccaggcagaccttaaactcatgatcttccaggctcagacttccaagtacaggcattacaattgaaaataaatgattattattagtgtttgtatgtatggtgcttggaatcaaactaaaggttccaggtatgctagacagacattctactacttgactatacttttttgtttgttttttgaaacagggtttctctgtgtaacagctcttgttatcctggcactctgtagaccaggcagacctcaaacccacaaagatcctcttgctctgccttccaaatgctgggattaaaggcctgcaccaccaccaccttctggctttttttttttttaatggtttgtagagatcttaattcagctactcacatttgtaaggcaagtgccctaccaactcccagctcccaaataaattacttataagtggaatcttattagatattattagttcctaagtttggctgcatgttggaatagcctaagggtttaatgtacatacctccaaagatcctgatttagttgtctatcgaggattcggcctggacatcaaaagcattttaaaaccttgttcccctgaagttaaagggactggattatctagccatctgaaaacaagaatgggattaaatgaaacaattcaaatagggatcaagtagtgaaggaaagtgacccctgggatggaaacaaatgaaaaaagaccatggtgatggatttttctttgggccatcagtacacacacacacacacacacacacacacacacacacacacaacatagagacttatattagttatgaaagctcagccttagcttaggcttgtttctaactagctcttataacttaaactaacccatttctattaatttactttctgcctcatggctttcttacttcatctccataccgcccaccctgctttctctgcatctcctggaaatcctgcctcgctattggacattcagctttttcttaaaccaatcagagtgacacatcttcacagtgtacaaagagagtatgccacaagatttccacaagttaccatcaagacagttttcagaattcccacaaactaccgtcaagacagttttcagaattcccacaaactactgtcaagacagttttcaggtcatagaatagggaaaggaaatcttgtggagttccgcagactctggggggaaggaactaaatctgaggagactccggagcagggttctcaggaggactgcttcgtggatagtgctattcaagcattcagccaagcactcaagggtatgtgcatgcaaggaaactaccttaagataagggggaaataccccaagagctggcagtaacagtgttcggggctcacacaggcccaggaacacatccgggccctccaagatgactaagaagcctcgtgattccccaggaatttggtagagtacacagaagtgtaattttcctcagtactggaggaaaataagcccaaaattaagaagtgccttgatcacacttaatgttaaaatcaagaccccccccccaaagatcgtttgatctttccaaataaattaccttacccagaagaaggtaatacctaaaggattacaaaattatctagaagctggatgttagtggtgcacacctttgatcccagcactcaagagacagaggcaggtggatctctatgagtttgaggccagcctggtctacagagctagtttggagacagccaaggctacacagagaaaccctgtctctgaaaaccaaaaaccaaccaaccaaacaaacaaacaaacaaaaaatatctagcacttaactaatggaactcacatgtccaatatccaattttaaaaaaataaatcaggggccaggaaagatggtttagtgggtaaagacgatcacctttaagcctgataacctgagttcaatccctgggacccacatgacgggaggaaagtgactcctgcaagctgtcctctgacctccatctgtgtgctatggtatggtaacatgcacacacacaaacccagcttttacaggatgtctaaattgttaaaatatgctttatgtttcttttttgtttttgtttttttcaaaacaaggtttccctgtgtagcttggctgtcctggaactacctctgtagaccaggctggccttgaactcacagagatctgcttgcctctgcctccaaatgctgggattaaagacctgtatgttaccactgttcaatttaaaatatgctttttcttaaatggtgttttatttagagacagggcctcatgtagcccaagttggccacaaactcactaactcaggagtgctgagataacaggcgtggcctccatacctgatttatgtagtgctggagtccaagctaggttttgtgcatgagaggcaagtgcactatttactgaacaacatcctttgtccttaaaatgcaactttatctaaaggatttcctaaggtcaaaacttagtgcaacaatgtaaaacttgaacaaattctttgtgtctaaagaaacaaggctttctcaaaagtattgtccttgtttcagtgatatttacaaagaggaattagcttagaggacaagattttatgttttaagtcaattgcttgtgttttctgctgatttcatcaggtttttgactatggaggaaacaatattaacaaaaccaaggttcattcaaatatctacttctgttaaggtcttttaaataaccatttgaacaaacaactgactccaagcaattttatttatatattttatgtgtatgggtgttttgcctgatgtatgtctgtgtatcacatgtatgcctggtactgaggaagccagaagagggcacatgtgggtgctgggaattgaacctgggtcttctgtcagagtaattggtgcacttaaccgctgagccatgtctccagcctttgttttagtctttattacatttagtaagtgcacactacaggcgtttgtgtgcgcgcgcacacacacacacactcagtgcataatcgggggcagagaacaacttgtgggagttgactttctccttgcaccatatgggtggcaaggatcaaagtcagagcattagataaaggaattaatccgaagagccatatttctggccccttaggtgattttagtacatttaagaccctgtgtatctgtaatgtctaaagcaatatgtctaaaacctattctgaaaaactttgggaagttaaaggcacatgtttaatacatgtttaataccaaacagtgcagggctcactgttattgagtgtttatgttatatatcttagactgttgacacatgaaatggccttgaaattaaaaaaaaaaaaaaacaattctgctatttacaatcaggagcattaagataaaaacttgccttttatgctgagaatggtgactcaggcctgtactcccagcacttgggagttggaagcaggaaagtgatgagttcaaggtcatccttgactacatagtgagtttgaggccagctgggctacagtgaaaccctgtctcagaaaacaataacagctcaccaccgggcagtcttcctatttcaaccccagcctacttctgtttggcttgcctagtaggcatgttattattgagtatgtaaagtgtgtgtctgtgtttgttgtatgtcagataatgagcccgatatcacaggcactgcttcctaaatctgtaaaaggtccaaagttcttatttttgtctgcattggagacctattatcttacccagccaaagattccaaattttgtttcagaagtaggtaacacattaagaactcacgacagtagctgatcatggtgccacttgcctttagtcccagaacttaggaggcaggagcaggaggagctctattagttcaaggtcaacctgatctacaaagcaagtttcaggacaaccagagatacaaaaaatgaaaacctatctcaaacaaacgaaaaagaaaaacccacgatgctacttgtggctggcttctttatatggcaactgcctttatgctccccttgtattattggggtcttcaaacacgtggcccctcaaagcatcctttaccaaactgatgccttctaaactagaatcgttaagggtgataaccttgcctagctatcttagggttactattgctatgatgaaatgccatggccaaaagcaaactggggaggaaaggggttatttggcttacaattccacattactgttcatcataggaaaaagttaggataatttaaggagggcaggaaccaggaggctgggactgatacaaaagccatggagggttacttcttactagcttgttccttctagtttgctcagcctgatttattatagagcccaggaccaccagcccaggaatggctgggctgggtcctccacccatcaatcactaattaggaacatgatctacaagattgcctacagaacaatcttatagagatacttcctctcagatgactctagcttgtgtcaagttgacataaaacacactaaccttgcttctaaccaactatgcctatcatctttttgtatgtatgtatgtatgtatgtatgtatgtatgtatgtatgtatgtattaacaggcaaggtctccttcttcagccattttggactaggctggaactccatgtgtagcctaaattggcttcagacttatggagaccttcttcccacatcagcaagtactacaggcttcggctgtgtgctcagcatgactgtgctctttaagcaaagataactagacatgtcctaacacagtgtactctaagaagtgccccagtgacttttgtttgtttgtttgcttgcttgttcatttacactactaagaactgaacccagggcctcaaatatgccagatgagacctctctcactgactgtatcccagacccctccctttaacctcagctcaaggttcaggtcctgagacgggaaggggagtccatgcaaggaaaacttctgaccaccaagtggattgcactcaagtgtccccaaatatctcaggccatctttgtttacacttaaacaaagtttttcttaccaggattacatgaacagttttattattggcttctatttttgattttaagaaatacaacataatttaaggaatacatcatgatcgttatgaaagctcccattgttcccattatgcttcctcaaatacaccttcccaccccctacataaccttattctagacctagagttcagaatttttacaggcttaactaagtatcaagccagacacatcctactcttgcagtgcgcttatgtcagctggtagctacttgtggttacaaagttaaaaagtaatagacatagccacaatgctttaaggacaacaatattcaaacccagacaatttctccatgtctgcaatatatgctttcatgcagttcccttttctacaagagggtcccgtgtctcaatctctgtagaaggcagaccttgacagggcactctgttcctgtccctctatgccataattcttccaccagtgtaaactcctgtgtatggtaaagatagatctacccatccacactttgcattgtattgtttccccttccagcataccagatcccaccaatgattctatgtgtggtgtccagggaacatactctcaacggttggcactatgtgtattcctgagactttttccctattcagtgtatgcctgccctactctccagaactgtgaaacatggctaatgttccaagtgttgttttctcatatgtacctaacttctccattaagtaagaaaagttcccagggttaggagttgtagttagtaatttcagataagagatttgagaaagaatagccccctgttgaatctcaggagaaaatattcgagaaacagcagaatttccagggaaaattacagctattgcatggaggactgacaaagtaaaactaaaaaccacccaaagagggatggagagatagctcagaggttaagagacctggctgctcttccagagatcctgagttcagttcccagcacccacatggtggctcacagtcatccgtaatgctgccctcttctggcctgcagatacacatggaggcatctgggcagaatgttgtatatataataaataaaaccttttaaaaaatacccgagaaggattaaattgttaaaaaaaaaaaaaacaaagaatcagcaagagcttgcaagctgcacagattttgcaaattcctatgccaagtgagaatctgtttccataggtgccttgccccaaggaaactcgttggacaggtagtcccatgcttatccaagactaggctgcacagctcctgacacctcctcctgatggaaagacactggcatgtcatacatcctaaatcttgactacatctgtaagcaaatgcattctgctttatttggaaaacatgcttattctcaaagacaaaaataactaggggcttgtgggctaaatgtcacctagtattgaaaactcttgtcattctttagactgaaaaaaaattgagtgtatttctgaaagagagaaaaagttatgatggtcctaactaatgctgtcaatcataattattttcctgaaattctattcacaatgaaagtaactgcacagcatggttgatagccaaactttctgcaaaattctgaaatggctgttctgagtcttgtcaaccatagatgagatcccattggaacttatttatttattaatattattgtgtatgtgtgtatctgtgtatctgtgtatctgtgtgtgtgtctctgtgtgtgtatctgtgtgagtgtgtatgtatgtgtgtgtgagtgtgtgtgtgtggtgtatctgtgtgtgtgtgtgtggtgtatctgtgtgtgtgtgtgtggtgtatctgtgtgtgtgtgagagagtgtgtgtgtgtatgtgagtgtgtgtgtgtggtgtatctgtgtgtgtgtgtgtgtgtaaggacaaattcctccagttggttctctcctcccacctctctgcaggttccagacatccagtgcaagttgctcactgggccaacttactagccccttcatccatttctaaagaatttatggcaggggagccagttgctggtatcacacacctttaatcccagtactcaggaggcagaagcaggcagagccctgtgagtttgaggccatcctggtctcaaattgagttccaggacagccaggactattacacagagaaaccctgtcctaaaaaaccaaaaaagaaaaaaaaaattatgtccacgtttggtggtgctcacctttaatcccaacatgtagcaggcaggggatggcagatttctgtgagtttgaatctagtttagtctatataataagatccaggccagccaaaactacacagtgagaccctgtgtccaaaaaagaatttatgatcaaactcataaaaattactataacaagtacttatttttaaatctagtatttttgttgtcttgctttgttttgaggcatttcttgctgtataactctgggtggcctggaatttgctatgtaacatatctggccttgaacacttgatgactctgctctgactccttcctgactattggagttaacaggagtgtactgctgtgcctggtacaaagctgcattcttaaaaaatgttagggctggtgatatggctcagtgggtgaagatgcttgttgtcaagtctgacagcctgtgttcaatccccaggtcccacgtggtgtaaaagaacagtcttggaagttgtcctctgacctctacacatctgccattgtacacaagccgtgtactcgaatcatgagcacgagtatgtgcacacacactcacatgcacacacacacatcccttaatagtaaataaaatacatatttctaaaaaatgtatttatttttatgtgcatcggtgttttgtctgcaggtatctctgtgtgagagtttcaggtctcctggaactggaattacagatagttgtgagctaccatgtggatgctgggaatcgaacctggagcctctggaagagtagtcagtgctcttaacccctgagccatctatctccagccccaaaatatatactttcttgaaacagagtttcactatgtagccctgattggcctacaagttgctatatgatgtataattttggatgttcatgtaatattgggaattgaatgcaggtccttgtgcattctagacccgtctaccactcagctgtgtcccattggagattttagtaagctttcacaaatcaccatatgcgtatttcctggcttttgcctcgccttccctatgaacttgccccttttccataatattgtgctggtactccatgcttgttgcagaattatttgtttacattgtaaagatgtgtctctgcctaagatgccttctgattggtgtaataaagagctgaatggccaatagctaggcaggagagactaggtgggacctctggagaaggagagaaagaggaggaggaatttaggcatgcagattttgccagcagactcagagcaagtcagacatgccatactgacgagaggtaattgaaccatgtggcagaatgtagattaaaaatatggattaattaagttataagagctagttagaaacaagcctaagctaaaggccaagctttcataattattaataaatctccatgttgttatttgggggctggcgatccaaagataatctaacaaaaaacaaacaaacaaacaaaaaacttggtatacatgatggaatgaaagtaggactctctctctccattttgggtaagctataaataaatccattttctttattagtttgcttttttcatttcttttaaggtacactgggtatttatacctacaataatacgaagcaggaaataacaatgaaaattaattaaaaccaatccagaaatggaagtttgaatcagcaaacaaggatgttaaagcaatggtcataactatagtatatattacccaaagttaagcaaacacatagaagatataaaagaagtcaaaactctagagatgagtgagagtaaaaacagactggagacaggagagatgacttggaggttaagaacgctgattgctcttgcagaggacctgggttcaattcccaagcacccacttggcagtttatagctgcctgtcactccagtcccaggaaatccaatgtcatcttttagcatccatgggcactaggcatgaacaaggatcacagatgtacattcaaacaagcactcatacataaattaaattaaaatgaataaactctcaaaataaaatcacggatggtactgcccacatttaagatgggtcacctcagaaatccttagagacacatcagaggttggtcttctctattattctaagtcctgtcagtctgaaaatctatatataccatcacaccactggagggttcacaattggcataatagctgctgagacagggtttctctgtgtagccctaaccaggctggcctcaaacttacagagatacactttgctctgctggggttaaaggcatgtattccccccccccattttcttttcttaaatttaaagtgtatgagtgttttgcttgtgtgcatgtctgtgcatcatgggcatgcatagtacaaacagaggccataagaaaatttcagagctcctaagactgaagttacagggagagatgaaccatcaagtaggtgctgagaattgaaccccagtaggttggaaaaacagacagagctatttaactactgagccatttttccagctccatttatcattttcttaatggtgacagattctctatccacctgttatctatcatctatctgtccgtctgtctgtctgactgcctgtctgcctgtgtgtatgagaaagcgagtgcttgatgcctgtgggtgtgcacatacatatgtgtgtgaatgtggagaaaagaaatcagtctcaggaatgctacccaccctcctattgtggagtgtggtgtatgtgtctgtatgtgtgggtatgcacatctttgacttgcagaggtcagaagaggacattggtcaacaggcattatcagtctctattcctttttaagacagaatgaattgctcactgaacccaaagggaggccgatggccctcaggccccagctatcctcctgtctccacccctcacagcagtggggttacaggggagcctgaggccaagtctgactttatgtgtttgttctgggatatgaactcaggtcccctgcttggagggcaatcactttactgagccatctccccctccttatgggtctgattgaacccgggtcattgtctaccttagtctggtgttctaacacaaaccacagttccagctcttttttgtttgtttgtttgtttgtttgtttttgttttttgagacagggtttctctatgtagctttggagcctatcctggcacttgctctggagaccaggctggcctcgaactcacagagatccgcctgcctccgcctcccgagtgctgggattaaaggcatgtgccaccaacgcccggccagttccagctcttaatgatgtcttctatttaatcaaactgaaacccatataatgtaaaattgagcatttaagtgaacaattcactgtctttttaaaactaaaagatttaatttaatttaattttattttattcatgttttgcccacattcatgtctttgtgagggtgttggatcccctgaagctagagttacagacagttgtgagttgccatgtgggtgctgggaattgaacccaggtcctctggaagagtagccaatgctcttaaccactaaaccatctctccatttcattgtcttttcttttttttaggtaaggtctcatatagctcaggctggcttctgaactcactaaatgtagccgagattgaccacaagcttttttctttttgagacagggtttctcaatgtaacagtcttggctgtcctggaacttgttctgtagaccaggatgtcctcaaactcacagagatctgcttgcctctacctctcaagtgctgggctgaccaccaacttgtgatctgtctacttctgcctcctgagtggtgggattacagacatgcactatcacatgtggtttatatggagctgggtactaaggcttcatgaatgttaggcaagcactctgttaactgagctaaatgtctagcccaaaggtttgtatttttgaggtatggtttcacatagttgaggcttgtcttgagctgaccctccctttccacctctcaagagctgatattataggcatgtgccaccatcacaggttttatcatggaaaatgttataggaagttttgtatttttcttttttcatcgtggggaattagatccaggatctcattaatgctaaggacatgctcttccaatgagcttacatccgcagcagtaaagattttatatgttcattcatggcttgatgtaaaatcatcttgtgcatatccacctttgcacaactccttaaaagacactggcttaacctggtggagtgagaggactctagaattgggagggccagccctactactgatagtcatcagctgatctcgagttagctggctgactgttctgggacgcagcctttttattgcacccttggacctaccctgtgctttgccttctggtttcatctttcccatgagcctaagaggtatgcaagataccaccactagtcctccttcacagatgaagaaacagtctgaatgcagctgactagaccagttgaccttgtgggacctgtctcctctccacccaagcctagagactcccctgggatttagcagaaagctttctcattgcaccctgtaccacctgcagagacgtctgcgtgtaccagggtgagctctaagattccggggagtctttctgtctgacaccttcccagcttatgtaaagtgacctggatgcttgctgcttgattctatctttgcctgaagaatttttaggtgtgactttagtctgcatttttgttgttgttgctgttgctactgcctcttctttggattgcagattctggtttaggacagacatctccagtgagcattctagggaaagaaaatattctggtttgcaatgtatagaggttggtcactggaggtttcacaggctaaagctaacattaagtttgaaagcaaaaaaggagaaaacttgtgggggctgtaccaggattcccacccccaacacttcactatgaaagcatttaaacaggtagaactgtatacaatggaaagactgaataacaaatacacttagattctatatttatcaactgattgctgtttgctctgtcacacattcgtttattgacccctcattgtctctgcccattcatctcaattttttgacaacttcaatgaagctgtagagttcactccacctctaagcactgtagcatgactatcattaactagcattcaatgtttggctttgcttatgttaaataatatacaaagcagacattgttttagattgagctcctaaactaggcccaacagatcaaaccaaaactaactcatcctaaattgtaagtctcttttttgatgtttttgtttttggagacatggtttctctgtatagccctggctgtcctggaactacctttgtaaaccaggctggtttccaacacacagaaacccgcttgcctctgcaagagattaaaggcatgtgccaccactacctggctaaatctccgattattaattgttatggtaaaagcttcaccctagagcctgccacccatatacccaaagagtctggaatgttatgttgggagctccacccaagcccctcctctatctctctccaaaccctgctacatctcagaaagccggacaaatgatgacccttcccccagatatactcaaaaccactcccacagggtatttaaactaccacccagaaaacagattgctggtttttctggtctccctttcctgtctcctctttcgaggactggaaggctatccaggaccatagtatccattaaacttgggctttttctttctttctttctttctttctttctttctttttaagatttatttatttatttatttatcatgtatacagtgtgtgccagaagaggacaccagatcacattacagatggttgtgagtcaccatgtggttgctgggaattgaactcagaacctctggaagaacagtcagtgctcttaacccctgagccatctctccagcccctctttcttttttaataatttttttcatttagaaacaatgttattttacatatcaatccctccttccctctccctcccatccttccaagcccttcaccgacccccccaacctacccccacccactccctaaggatagtgagacattccatgggggatcataaaagtctgtcacatcattttggagaggccctcctttgtgtatctgggctgaaacagtatccctccataaggaatgggctcccaaaatccattggtgcacaagggataaatactggttcatgtgggctttttctaattcggtttgatttggtctgatttggattgctgcatcggcggagaggcttgtggggtatagaaacttttcattaatgtttacaagaaaagtaattttgaagtgattagctcaccttccaatcactgtttctgctttctctagccacttgccttgggccattgacatggctagcaggtaaaatcacttgttttgcaagcctgatgatctgagtttgagcctggaaaaccacctaagacattggatatgatggtatacatctgtaatcccggctctcctttggtgagatgggaggcagaggttggagaacccggaacctctcaggccagtagcttcaggtatgtagcatagaaagtctcagacttctaaacttgctttagtttttccagtgataaccccatcccagagctacctaggggccgccagccatcagttgactcaacatacatgaagacacttcttacttgggaggatttgagaatttttagaaactgcatgtcagaaatcaggacatatcaatatctgtcatctatctacctacctacctacctacctgttatttatgtaccctctacctattttccatttatctgtctttgtatgtatgtacgtatgttttatgtatctatcacctgtctgtctgtctgactgttcttcctgttggcctacctacctacagacccacctatcatctttgtatgtatgtatgtatgtttgtatgtatctatcacctgtctgtctgtcctacctacagacccacctatcatctttcacaccatcctactttgtactgtcacaattcattctttctttttgcttacttgtattccattgtctggatgaatatttgacagttcattaattctcctgtataaaacatcaccttggattggtttccagtattttctttttaatttttttttgtgttttggttttatttatttttattttttgtttgttttagttttaggggacttggtttttcaagacagggtgtctctgtgtaaccctgactgtcctgggactcactttgtagaccaggctgaactcaaacacagagatgcacctgtctctgccttctgagtgctgggattaaaggcatgtgccaccattgcctggcttctttttaatttgtaaagattggttgtcatttatttatgtgtgcgtgtatctgtgtgttaatattcccacaagcattcagtgcccaaggaggcctgaagaaggcattgggtcccttggtaccagagttatagacacttgcaaatatttgatgttggtgatgtaactgaattgagatcctctgaaagagcaggaaatgcttttaactgctatgatgtctctccagctcctattttaaaattttttattggagacagggtctcactgtgtaacccagactggcctcaaattcacttttgccgtgtgtgtgtgtgtgtgtgtgtgtgtgtgtgtgtgtgtgtggtgtaggccagatgacaactacgaatataagtccttgcctttcactttgtttgagacagggtttctcctttgctattgtgtaggccaggctgacctttgagattctgggcattctcctgtgtctgcctctcattttggcattggaatgttgcactatcttgctctaaagaccaggctgtcctcgaattcacagagatgggcctgcctctgccttctgagtgctggaattaaaggtgtgagccactgcctcctggctccacctctgcctggcttaccctgtctatctttatgtgaattcttagaagctgaacttatgccttggagcaagtgctttcctcattgagtatctccccactgaccatgagcttctgcctcctgactccatctccttggtgttgggattaaaggtgtatgtctccctgttgttttgttgtttgctttttgttttgagacaggtatttctctatatccctgtctggcctggtactcataatgcagtttaggctggccatcagcttgcaagaatcctcctgcctcagccttccaagtgctagcaaggcctgacagtttttgtattttacttgtgttagctaatttaatccccaataatactaaatgcagatgcattactattcccatcttatagctgaggaaaccgaccacctactgaggttggaatacaagtttaatgacatagtacatgtgaaattcttagggcaagatttagtgattacaatgtaagaagtgtatgttagtgattacagtgcagagtaaccattaggaaatttttattttacttacttggtctttatatttactacccttgattattagtaggaagcaaagttgccaaataccatataggatgcccagttaaatttgaatttttggaattaaggagcaagagggagggcagtagagaagtgaataaaaacaaaatattgtgatatatatatatatatatatatctgcatgccgcaataaaatactgtactttgtatgctacctacaagttaattatggccagagagctgactcatctggtaaaggcacttgtcaccaagcctgactgaagttcagtccctgggaaccatgtgatgggaagagaaaagcaactcctgcaaagctgtcctctgacctccacacacagcatggcttgacatacacaataaattactaaatgtaattacaattttaaaataaaataaaaatattttaaatttttaaaagttttgaatattagccaggtgtggtagcacacgcctttaatttcagcacttgggaggcagggacaggtaaatctctatgagttcaaggcccatttggtctacacagtgagttctaggccagccagggctgcacagtaaaaccctatctcaaacatttttttttttgtatcctagataatgaaaaacaaatagcgtaagtcagtcacatgcaattttgactgtaaaaatatgagtgtggtgacggtagcatacacctttaattccagcctttctctgtgtagcctgtcccggaactccctctggagaccaggctgacctcaaactcacagagatgcccctgcctctgcctcccaagtgctgggattaagggggtttgagtggtttcaatgcaggttttaaacaggagggttctgaggaggaaggagcttgtgaaagaaataggatacttggggagaacatgggcttgggctgctcaataactgtgtatacagcattctggaggcctttgaagctattgtctttaaagtgttgctaaagaatgagatgctaatgagatgacagtgtggttcctgggcccatctgacagggggacaattgataaggaaaaaaatctagatcacaggaatgcaggttagaagatatttattgtaagcaaggtgaacagccttgcttgtgggtttcccagaaagtgtctgggagaagaacgagagacccttccaaggtcatatgctttcaggcctggagcttggttcatctttattttaacataaaatatctataaacaaaagaaatatctttgtatttgcaaccttctcagtaaacactgttaattgtgcttgacttctcagctgtcgagagacttcaacctcattctgtggaaggtcttagttttcttctctggtcctcaggatttcccttgtcttttatctgactcaggagcaaagatagaacctgtataattcattctgcagatgtggaaacagcctcaaagaaaggaaatgatgtagctatagccttaggtgtcccccttcacacactccagggtcccaggtagctgaggctcacctggagctcagcatgtggctgaggatggccataaactcctggttctggtatcatctttaccctctctggtgctgggattacagggatatgccaacatgcccagcaaaaggctgagtttcagtgttttagtgtgtgtgtgtgtgtgtgtgtgtgtgtgtgtgtgtgtgtgtgtgtggatgcttgtgtatcaagatgcaccatatgtggaaatcaggacactttgtaggagtttgttctcttttctcctaggcatttaatttaggtgattagaaatttgtaggcagaagtttctgtccttcacgctgatctcaaataaccacacagaggcttaatactataaatgcttagccaatagctcaggcttattactagctaacacttacattttcaatgaacccatatttttatctatgctttgccttgtagcttggtaccttttctcatttcagcatgtccatcttgcttctctctgtttctgcttgctactcctctgactccacccttttttccaacattctcagattggctttcccacctaactttatcctgttcagctattggccagtcagcttctttattaaaccaactacagtgacatgtattcacacagtgaaaggaacatcctacatttccccctatttgcctaattaaaaaagaaggctttaactttaacatattaagattatatacaacaaaacatttattaagtaagaattatagttacaatatagttcatttgtatttggcaaaattagagaaaatattctattatctattttatctttgtgatatacctaattatacctaatttatcatctcatggccccgcctccactcttttattttcacagatgaggtctaatgtacctcaggctgtcctcaaattccctatgtagtagccaaggatggcttttttttgtttgtttgtttgtttgtttttttttgttttttgtttttttgagacagggtttctctgtgtagctttgaagcctatcctggcactcactctggagaccagtctggccttgaactcacagagatccacctgcctctgactcccgagtgctgggattaaaggtgtgtgccaccaacgccgggctcaaggatggttttgaagagatcatcctcactgctgggattacaggcatctactgttactcatggtttatgtggtacaaagaatgaaagaagcccagggctgcatgcatgcaaggcatgcactctaccaactgaactacaaccgaaggtccccagcccatctcagctctctgaagccctatcaagcatctgtctccattaacacagctattcaagccttccctgtctgtggcaattaaaagtggagcaaatccatgacagagagggacagcagcatgactaagtgttctgttgggagagccagtaagggacaggtggcatgtgggccagtggggtgtctttttcaactcctttctgaaatgggtttctgtctctcccctcttccttctcccctcttttcctttctccacttctctcccctttgtcctctttttactcttcctcctcactctcctctgtcttctcccccttctattatttgaggcagggtcttatgttcctcaagctgtcctcaagctcactatgtagccaaggaagaccataagctcttgatcctcttgcctccatcttccaagtgcaggtatactgacatgtagccccacgtgcatctgggtaccaccttcccttgcttatagccagctctttcagacttcaaggttttgctgcacaagggcttttgttcctggctaacctggtgtcctagacagaaggaaaatgaaagtggtttgaggttttattagccactgtttctgcattttaattttttcagtcaggccaagactgaggtagttctgactcaagaaaactgagagccagaaccacacagtgtgaaagaatgaggaaatgacctagctgtgatttgctgccttggccaacacagcttcttggagaaccaccaagtacctattttatatctgcctgaatcttcacaatatcctgggaggtgggcttgtaaccattctggcaggaatgaagacatcaaaagagatacgtgtgcctgttcctacagctattgttgtttgctattgggacaaggaccccaagaaattagaatcttcccacgagtctcattctggtgaagggaaaggccttggagccaggcagaagagaactttctcccaaaaaagatgccacaaagttctgataatttaaatttcaagagagactggagcccaaacaatgacctcaccttatccacgaccacttagctatgcataccccttgctctctatgtaaccctaagccttgtgtcaggaccctaaatttggacttgaggggttcactggacctctttgttgctcttctcaatgtgttcatagtgcatcaaatctctttattctgcgtgtcaatattactttgtctcttttgttggctttttgggggatagatgggcaagtccagcttgtcagcactgtcgggccctggctctgacactcacatctctgttgcaggatctaatattttcgtatggtgatttggttatgggggctcagatgaccgtgtctgtgacttagaaagcaaagtgacattggctgctcacttgagtgtctcccttggctcagttactttttgttcccctccctttgctggctatttgaaattctcattctaaatccccagttttacttggattaagacgataactgttaagtaatcttactgtagatttacagaaccttgacctgcatataacataagaatgtgtacttcctcccattccatattctttgattctgggcatcagataacataaaacatataagttgctatgatgtttaacttgtagaaagtagtttttgttctaggaggcctgcccattgccacttcccctctttccctttcttataaaagccgtctgttgggctggggagatagcttagtaggtagaatgcttactgcacgagtgtgaggttatgattcccagcacccatgtgaaaaactggccttggtggcacacacctgtaatcccagcactggggaggccgataggggagaatcctggggtttgttggccagacagactagctgagtcagtgagagcttggtttagtaagtgaccctatctcagaaagtagtgattgaggaggacacttggcaccaacctctgcccactgtgccccctcctcaaagacacacagacaaacagacagacagacacatatgcatacacacacacacacacacacacacacacacacacacaccacaatttgtgccctcaagtttcctgagatgaggttctgaggcaataggccccatctcctcaggacaccagtctctgaataaagctgactccctgtttacccagtctcccacctctagaggagggctggcattcagtggcaagcagttggacatgggttcagtaacagcaagttattggtagaaggattggatttttatgtttctctgaagtcctcattactaattcttggcattcctgcctcataaatcagggatagtttgccctgttgacactggcaagaagcttaaggcagcacagttcaatggtcacaaaatatgacttctgggggtcagcatcacctggaaatgtgttagaaatgcccattcctggcctcattctagaacttttaagaacctctaggggttgggtacagctgaaggacacagcatacacctagcatgtgcatctcctacataaaattcccagaacaataatttttaaaaaagacattcttggggaaggtttagagtatagtttttgatttccaacaccttagttttacctactatgatagaatcttaaaattatgggtctggccaagtaacctacaaatctgacttcttgagttccattcttgcttgatacctggatcccacaatgggaggagagagctagttcctgaaagttgtcttcttacctccacactaataataatcaataaaacagaattgaaaataaacatgcagacacattgagtgtggtaatacatgcttgtaatcagtcccagtactgggaagtttgggggtgaagaagcctgggtttgaggccagcttcagctacatagtgaaaatttgtcccccaaataaagaaaagttgtagataaagactgtctggaaggagatggtttggctcttttcttagtgttcttgggccagttggcaatttcctttatactcggtttttttctctctctctgtataaagtaataaaacacttaatattttatagtatgcctggtgactagaatcatctaggatgctagttagaaagcccagattcccctagagcacaccactctctcaatactgggaatagaatcttgggcctcatcaatgctaggcaagtgctctaccagtgaacaacatccctaccttacaacataattcccaacagggcaaacattggttggaagagcagaagacttttaaatacttcaaaaccaaaccaaacaccctaaaacccagggttttaccatgtaacccctagaactctctttttagacctggctaactgtgcacttccagagatccagctgtctttgtcttctcactgaacctgaaagcttgctgtgtggtcttggctggttaactagggagctcctatctctgcccccagggctggggttgggggagtctatgtctgcttttacatggaccctggggattcaattcaagtccttgtgcttgcgggcaaatgctcttacctactgagccatcttcccaacccagaattttttttaataaactctcctagcacataatggagaatatgatagtttcaaaggtgctcaaaaaagtgtaagtgactggatagatggtttccttgcgagaccaaacaatagtggcaaagatgggtaattaccaagtgcttgagtagtgcctctgtttgcacagcctattaatcctcacaaacacttccaagggaggttgaggataggcttcgatggatttgcctgggtttcttatcctacatacagcttaatttaagcatctgaaaaaggtaacaaatggcgtttttctcatagttttgtggtaaggatccagaagtatgcttttcatttttttttttttagaactcctgccactgtcaagctgtcaccctcccaagaacaccctgtcaaaaaggtggagaaaagagaatttgaacccaatcagtgtaatcccagaaagatagaactggctcagtgattgcggaattgtgatccctgctgtcagtagtatcgctagggaacttgttaaaaatgcaaattataaaacactccccaccccatcccagatccactgagtcagaaactggcggtgggggctcaaaagtctgtttttcaaagctgttcgaggaattctaaggcacgctagagtttgggaacagtctttagaggttttggcgggggtggggagtgggagtggggtagggtggggtagagggtggtgaggagaagtgttaaaaaaaggaagaaaggaatgaaaaaaggaagaagggaagaaaaagaaggaagaaaattaaaaacaaaacaaaacaaaaacaaaaactctggagatgtggagactgggtccacttcacctgaaggtgaggaaaatgctgtagcaggctggcgcgcaagggctgctggggtctgtagtcccgactgcgccttaggggacgcgcctgcgcactggttgcgagctcgctctagtcgctgtagtcggggctcgggaccggctgccatcgtagtggagggactgaggagtcgtcgccgccccgagtcccggtaaacacccgcgggccgactggggggcagctctgtggttaggagggagcttggcatgggggaaggcacggagagtgcgaagggtagaagagtgcggcgcgcgagtcggaacccagagccgaggctgctcttcgcgcagccggtgtccgtggggggcgcccggagctccggctggtggcccgagccgggcggagggtgggtcagcgggacgagccgggctgctagtgcctggcgcaggcgcccggagcccgtggccccgcgaaccccaagttggaagagagccgagccgaggcggacgtgggcagggtccagcgccgcgccccgctgtcgcgccggggggctccgctcccgcggctcggcctacgcgcggggcccggtggcagcggcccgcccgagcgacgtggccctttgaggggcggcggccgggcccacctgccacctggcaagctctcccgagacttttccaggctcccactcgcggaggaccttcttccgtagcctgcctccccttctagtctttcactcccctcctcctcccattgtccccactcatggtggtctcggcccaggccggcgccgccgacttttgcggacgtggagctgtcactgtctttcctttcaagagcgtacttttctttagcaaagaaaaaagtagaggtgagcgtatgtgaagggtcgaagcctcgaagacatggctttaaagtagaagactcgagttttcagacatggttctctgggctgcaacttcaaaagaggaaaataagggtcagtgcacccgaggtaggcattgggcctaaagttaggtctgtgaccaggtgaactttcgcagtacccgaagctgacggttccccagtcacttgtttttcttggttgtgttagaatcctcctaatcttgaattttctgcttcgctctagctgttgtagtgaacttggctgaagggaggagtgtggagaaaagagtgaagagttttggtttttttcccttcaaagttacagaacacaacctagccacccatcattgtgctcttaagtgtgctgcttctcctggatcggtgagatcttatgaaaataggtaaaggccatgtgtgttcactctcagggttggcaactggtttggttctcatctgaaataaagtttttttctggggggcggtggcaaatttgatgagattcagccttgcatatcacaggtttacttaaggcttaatttttccgggttttagaaaagatgcaattctccttgaatagttagtgtactttgtgtgtgagctcatgaattcagactttagaatagacctcaacaaggatataatgtgaaaccaaaagcatgtattctagagttgtttttattttattttgagacaagatcttgctgtatagctctggaatacactgtgtaaacttagactggcatcccacttaattgtatcttcctgtctctgcctcctgagtgcttcagttacaggtacatgccaacacgataggcacaggagaaattttagatttgttgatttgtgtgtgtgagcgccatgactcgagttggaggtcagaaggtaaccctcaagagtgtttcctccttttaccctgtggcttccagggatcaaactcagatcaacaggcttgcatagcaaatgcctttacttaatgatctattctgctgaaccagaattttttttggggggcgggggtggacagagtttctctgtatagccctggctgtcctggaactcactctgtatggagacagagatccctcccaggtgctgggattaaaggccttcactaccactgcacagttcaggagagatttttttgttttgttttgttttttgttttttgttttgttttgtttttggagacaaggtttctctgtgtagctttggagcctttcctggcactcgctctggagaccaggctggcctcgaactcagagatctgcctgcttctgcctcccaagtgctgggattaaaggcaagcaccaccaatgcctggcccaggagagatttttaaaagtagagtgtgcagctcagttgttagagtgcttgcttaccatatacaaaccacagaatttaagtctcagtaattgggaggtgaggccaatgctacttgagacccttttggaaaaaaagggagatgttctcaggtttcatttttgagattgatttgtagttcagaattggtttctaccagtttatttgaaaatctgtctcaggtagttgggtagtcttgggagctactgaggtaaacaatagtatggctataccaaggacagctcaaaaagctttgagatagaaaaggaagtggaagtgactagtgtgggaattattgaaggaagtggcaggactggtctctgaaggctaggcttagtggcgtaccaactcaaggtcagcctggtcaacatagtgagttccaggcccgccagagctacatagtgagacccagtcttaaacaaaaaaaaaaaattgcctatcgtctgagttctgcctagagcattggttttcaacccctttgacaaacgtctatcttcacaaaactttacagtagcaaagttacagttatgaagtagcaaaaacagttttatggtgtgtgtgtgggggtcagcacgacatgaggaactgtgttaaaggattgcagcattatgaaggttaagaaccactgctctaaaggataagtagcaatgtggcagaggcgaggaaagggaaggcagtgcagaaaggaaatactcaaggctgtgtgtcaatgagaccgaatgtgggagaaaaagagttcagtgagcaggaagcagagaggaggacagcattgtgggactcaaggccagaaaggtaaaaggagctgattctagaaaacttctgtgtatagttttgaattttatgttgttagagataaaggtttttgggaaaggcagtgatgtgagttggtgcttgttttaaaaagatggctctgggataaaagtgaaagggtgaaagtgactgttgcagaagtctcccttataagtgacagaggctggccttggaggtgggactaaggggttgccatgttttttgataggattgttttagggctggtctggttaaagggttccttttctctaaggatatagtcattagcatctttgagaaataagagctagatcagatgcaatctggaagtgagcttgagttttggactatgtgactgtcaacacatcaatccatgtttgctcaatgtgttttccttctagtcacagaaacttggtacttgagttttacagttggaagagattgtctactgtatagtggcaaatatgttttaggttgcaggccaactttggttggaaatagcttctggaagtacttactgttaaggaggatccgggcaatctatgcttcagtgtgaggtcctcaccctccaccccacccccaccaaaaagagtggattctggttgtattagttccctggggaagtatgctatgatttaggactgatatctctagtgaatagttatctagtaggtagtctgtgtgtgtgtgcttgcacacacatgcacacaccacgtacatactattacactggcccagtctcttagctttctgtttctgtttttgatgacagggtctcagtttgcagactaggctggtcttgagctcgcagagatccatctgtgtggcctacatagctagttccaggtgagctagatgtatgtagtgagagcttgtctcaaaagaagaaaaagatgttttgcctaaaactagttttagtcagaactagaaccaaatgctgtaactctggtactctccagtttaccgaagtgagtgtattgccactgtacaaatgttgtcatagtaggaaaaaaaatacttctacctatgcctatttactgtatagacaagatattaatgaattttcacctagaaaggagtttagtttactccttttgactcaggaagttgagttagtactaacaggaaactgccagtctcaaggctcccttcctttcttgtgccttacctctcttagtttggggattggttataagaactaaggtaaaagtatttaagtttgttttttctttctgtatttatagtgcttagcaaattatggttcataaaaagcattcagtaaagacatgctaacttttgtgctgtaaatgatactgatgttgagtcagtatagatcagtaaagggccttccctgatgtggtgccctcatctgaaaatattaagttgcagcttttttttggggggggggggtttcgagacagggtttctctgtgtagctttggagcctatcctggcactcgctctggagaacaggctggccttgaaatcacagagctccacctgcctctgcctcccaagtgctgggattaaaggcatgcgccaccaatgcctggcatgagtagtagttctaatgagaagctgcccctggccctgccctcctcctcctccagtctagtagtgaccattgttggagagctgctgccaggttgactctattgctgctttttaactcagagtctcagtgcttcccccagcctgtgtctctaggagcttctgacttgtaggaatccactttacagtgacccttatggagagaatatgtgtatgtatgttatccttagtttgcaaatgtccatcatatccaagtggattttatcccatactgtgcaggagtcatttcctcagaagttttatcttctctgttctgtataaaatgtctttcttgtagattcttctttttgggggggtgggaggctttatgctgggcaaataaagacactttttttctttttggagtttcccaaggttatcacagatctgtttaaccagagtactttgttaatggacccttcttctctttcaggtaacatgcatttcacagtggccttctggaaacaacgccttaacccaaagaagtgactcaaccagtgagaatttcaggtgtggtgacattcctgtgagagacatttgggggcagtatggagcagagggcaagtcctggtcacataactgctgtgaagagctgtgtgggagaggatgttagttactggttacatcaattggcttttcccacttgtgctgtgttataaatatttatcttcttaaacatgttcaaacatatacatgtgatggttaagaagtggagaaattgctgggtggtggtggcacacacctttaatcccagcgctcagaaggcaaaggcaggtggatctctaagttcaagaccagcgtggtctacagaatgagttccaagacagccagggatatacagagaaaccctgtctatagggagggaaaaaagtagaagaattcgtaagaatgcagcatagtatagtgtagaaaacagaaagatctgggctctgattttgcactgacagtctgtgttacttttggtaattttcttaattctgctggcctcaggttatctatcttctatatagatatattgattcttttctacctccctggggttattgtgaggaccaaataaaacaatacatattaaatcttcagaatcgaaaataaggggctggagatttagttcacttgcttgcctaacatgcatgaagccctaaattcaatccctagtgatgaattaattgggtgtagtggcacaagcctcttatctcaggaccatcagcagttcaaggttgtctttggctacataatgaatttgaggccatcctgggttacatgagaccttgtctgaaaaaaaggaaagtaagaaaatgaatttatagtttaagacatctagatctataagataggatcagttgatactattattataaggaaaacattacaagatagactcattttaagaggccaagaaaggggctggagagatggctcagaggttaagaacactggctgttcttctagaagtcctgagttcaattcccagcaaccacatggtgactcacaaccatctataatgagatctggtgccctcatggcatgcagacatatctgcaagaagaacactgtataccttataaagaaataaatctttaaaaaaaaattgaaaaaaaaaaagaggtcaagaaagagtagagctgtgtggatagttgcacaagcctttaattccagaggtagaggcagttagatctctgtgaatttgaaaatagactggttacatggcaagctccagatcaaccagtatgacatagatagaccctgtctctttaaaaacaaaacagcagagaaagattagtgggccgggggagatggaaacacacacacacacacactgaagtattgcatgtgaaactgaactattaggtgaggaaactgaaaggaattatagtcactacctctgagaaataccttcattgctataggtttattgcagtattattatttaccatagccaagataatagaaacataaacatgtctgttgataggtaaatgggtaaatgtgaactatatttatattttacacacacacacagtgatgtatatgtgtaataggaagtactacttggccttgaaatagaaggaaatctgtccatttgggatagcatagatgaatctgaaggacattatgtcaggtaaattagtgcacagacagatgtaccatctcacttatatatagactaaagtcacttttagaaatggagagaagggtgctaccaagaattagatacagaaaatggggagatgttagtcaaaggatacaaacttagaaaatgaataaaatttgaaaacctgttgggcatagtggctaataactaatcccagctcttgtaagactaaattaggaagcttgtgaatttgaggttagcctgggctatttggcagtgctttctttccccttatcctcttcaaaacccagtaataataagagacttgaaattcactgtaagagtaaaatttgagctgtggaagtggcttgtgtggtatagtgtctgcttacaagcatgaggacctgagtttgggtcaccagaacccacctagaagctatgaacagtggcatgtgcctataaccacctccctccccccaaactggggagtgtggaccagggagacaaatttctaaactcattcgatagtctgcctagaagaatcagtgagagacagaccctgtctcaaaaactaaagatgtaaaactgaggagagagctgggcagttgcttatggagctaaagccatgtagctgtgttaaatgtgccctcttctctgagtccttcctttttgtcttatctccttctaaagcatgcttttccttccttccttccttccttccttccttccttccttccttcttttttttaagttacaattccctcctcgattttatccatgctgttgattgtccaccacatgtctaacctccattgctgaacatgttggtttaaatggcatggcttttctcttcctctttgtcatttcccttttgacagatgctgaagtttgcagcttgttctgggatttttctttttaaattctaataaaattacccttaggcttaaagatagaaagcaagcaagctgacatctgtctacctctagccgctatactcatgtacacaaagtacatatatcatataccacatgcgcgcgcgcgcgcacacacacacacacacacacacacacacacacacacggggggggggggagcgctaccagtgagatggggcagcaagtaataagcacttgttgaacaacctgatgacctgagttagattcctagaacccatggtggaaggagagaactgactccgagaaattgtcctctgaccatcttatgcacacccacactcacacatattcatgcacaatgataatactttttttaaatagaaaagctgggtgttgtaacatactccttcctttaatcccagcacatggaaggcagacgctggcagatttttgtgagttcaaggtctacatagtgttctaggacagccaaagcaggaggatctagagtgtaaggttatccttgtatcatagcaatttgaggtagtctggactacccaagaccttgtctcaaaaagacacacatacacacccaaaaagaaaaaaaaaaaaggaaagaaaggaagaaggaaagagagaaagaagagaatggaaaagaaaatcgtttcctgaggatcagtgcccgaccataaacttgaggctattagttgccagtcaccatcatcaccatgtctttgcaaactcattcatcctttgtctccactgtgagcattaatgtttatcattctctcaccttttgatttagtttgtgtttgtgttaactagttgccctataaatgcttaagacagaacaaggctttgattggcttatgtaaaggagtctcatttgctataatcagatgcttgcttaactgtgctttttttgatagtcatggagagaaaggaaggagatggtgatgtgatttgtgaaagataatagaaaggaaatgagtacaagggagagcagttaagtgagattgcaaagaagttgtttcagattgttagaaggcatgaaaatgaaatatgtacacttcataagaagctgttatctgcaataaagaagcaaatcagcttccattccttcaatgatggcctatcttaccagaaataaagaaatttcctcaaaaagaaatgtattggaaaagattgtttctgtttccaaatattttcaaaatgttcctcagagtagccatttcaccccagttcccaaagcagttctttttggagagatacctgcgagacttgtgttgtagtttttatattctgtaatcttgggcagctgatttaaatctctcagagttttatatcccccccacccctcaaaaaaaaaaaaaaagatagggtagctgaagctggccttaaactcactgtagctaaggactatcttgaaatttgattctcccaagtgctgggattccaagggtgcccccctccatccctgtctactgaaagtttgcctgtgtcctctcagatgccttcttttccagtctctgattatactttgtgtttcatgtgctgagtcactacttttggtgttttgaagacagggtttctcagtgtagctttgtagaccaggctggccttgaactcatagagatttgcctgcctctgcctcctgagtgctgggattaaaggcatgcgccaccaccgcttggctgagttacttactacctttttagtgctttgttttcctcatggtataggactaatatcagtaacataagattttctagtatttactgttttacaaatgagaagccagagccagctgtaatcctagcacttggaggtagaggcaggtggatatctctgagtttgaggctagcctagtctgcctggcttacatagaaagaccctgttgtagcacaaaaataaaagacccatagacaaatcttcaagcttcaagctgaagatcagagaagcaaggcagccaagccagtagatcttacctctacccagctgaaatggcaatcctgtctccacaaagcctcagactcaaaaggctctcagatcctgtctcctcctgccttttattcctttctcccccagccacataactccttattccacctgcctattgctggcattaaaggcatgtgatgccagatgctgagatcacctttgggtgagctatttcttttaggactgcatcaatttcctgtattctttggccttaaactaacagagatcagtctacctcttaatcctgagtcctgggattaaaggtgtgtaccaccaccttctagctctatggctgctgggattaaaggtgtgtatcaccactgcctgacatctatagcttgtggctaacttttgctttctgaatcctcagtcaagctttaataaatcataaataatatatcaccaaccttgcctaaaaaaaaaaaaaaaggccacgttgtcttctgctttaaactttggcacaaagactggaaggaaacaaagcataaaaatgttagtgggttttgttattgtttttgaaagagggtctcatgtaacccaggctagcctcgaagttgctatgtagctgctctcatgagcctcatacatttaccccccagtgctgggattacagacagggaccacaacactgctttaaattgataatacttagcaagcgtttgttgagctgcttctatattaggtctcaaggatcctcctgctttaaggactttgtcagttttttttttttttttttttttttttttttttttttagaaaaaaaaaaaaaaacaaagctacttgccagcaatcacacttcaatattaaaatttaagatgtttatgtcatgtttcctggtttctttttttttttttaagattttatttatttatttattatgtatacaacattctgcttccatgtatatctgcataccagaagagggcaccagatctcataacagatggttgtgagccaccatgtggttgctgggaattgaactcaggacctctggagagcagtcagtgctcttaacctctgagccatctctccagcccctcctggtttctttaaaataactagatatattttaagtgccattctgctaagtaccaacctaggctatatttaaaaaaagaaagatagtgaggtgtgggtctgggagtgtagatggaggaccacctagcattgtgaggtgtgggtctgggagtgtaaatgggaggaccaccaagcattgtgaggtgtgggtctgggagtgtaggtggagcactactgagcattcacaaagcctttggttctgcccacaacatggcaggtcatcctacccctcaggagggtcagaaattcatcgtcatttccagttatatagcaagtttgagcctcctaggtctacatgagacccttctcaagagaggaaaggaagagagataagcaagaagaaaatgcagtgtttgccaggaagaaacttggaattcccacatctagaaacattcctctaatatttagatatttttctgttccagaaaagagcagcattttcataccctaccacttatagtaagaactcctgcaatattgagcttagccacagaaagactaacagtggctttttttcttttttttttttttttttttttttttttgtgtgtgtgtgtgtgtgtgtgtgtgtgtgagtgttattgttttgtgtgtgtttgtgtatggtgaatgtgcacatgtgtgtgtctatactcaaaggacattgggcattgtatcactctgcaccttatgcccctgacatagaatctgtcactgaacttaagagctaggctggttgctagcctcagctatcctcttgcctgtgctcctcacaacactggtgtttgaggcatggtcatgccaggctttttatgtgggtgcttgtgtttgaactcagtttcccattcatgcttgtgcacagcaagtgttttatcctctaaaccttcttcagccctacaataaagttgttttctgaggaaatagatatttttattgggtttcacattttatgagagaaatttttttttttttcctgagacagggtttctctgtgaaataaccctggccatgctggaactcaccctgtagacctgactgacctcgaattcagagatcatcttgtgtctgctgtctgctgggactaaaggtgtacaccaccattgcccgacaaaacttttttttattacgtgtatttatttgtgcgcgcgcgagagagagagagagagagagagagagagagagagagatgtgtgtgtgtgtgtgtgtgtgtgtgtgtgtgtgtgtgtgtgtgtgtgtgttcgttcgagcatgcgcacagtgcatgtgtagaggtcagagtataacatgcaggagtcagttctctccttccaccaggtgagttttggggatcaaacttgaattgtcgggtttggcagcaagcacctttatctacatttgtctacatttaggcagactattttgcttggccataaggtatacatgaagtgtatatacatacatacatgcaggtaaaaggcccataaataaaaatagaaataatactttattaaaataaatcagtgtcaggaatgaagagcagtagtcaagagtgcttcccctagtcaggcagtggtggtgcacactgttaatcccagcacttgggcggcagaggcaggtgagtctctgtgaattcaagcccaacctggctacagagtgagttctagaacagctggggctacacagagaatccctgccttaaaaataaacaaacaagtaaaattgaaagaataagtgaataaaatgaaaaaaactttggaaagcataagttaatttagcagccagacatgtcctcttcagtagtggtatatactctgaactgctaaatttttttttttttttcacttacaaggtttcctacttttcattttgtcaatgatactggtcagttttctaggttatttttagctttatagaatttcttagttttctaggaagatactgatattgtttgtttcatattttattttttaattttgtttttactgttttgagacagtcctagctgtctggaactcactttgtagaccaggttggccttgaactcacagagatccatctgcttctgcttcctaagtgctgggattaaatgcatgtgccactactcctggctctccattaatttttatatctggctttaattttttttttctttttgagactagagtttcatgtagctcaggctagcttctaactggttacatagctaaggataaccttgaacttctgatacttctgcttccacttttggagtcccgggattacagtcatgaatcaccatgcccaagttttatgcagtgctgggtctgaatccagggcttcatatgtgctattcatgtcctctgccaattgagctatacccttagccctcagttcttttttttctgttcctttgctttgttttctttttttcatgaggaatgttgaactataatagtagcttaagaagaatcatataaaataaggcatcatatgaaggaaatagtaatgagtaaaaggaagaaataaaatttaaattacaagattttctacctactcccacctatcttattttttaagatctcaaggacttttgcttcttgagtacttctgtatttcctgattgatttttttgtcatagatctgtgttaaatatgcttttggatattgaggactaggtaataaactacagaatgatggtgatgtttctaagggtcctttgggaatcagatagtagcatcatacaatgcagagttgaaactcttacattatatctcatttctctttaatttaggtgactactaatgattttaagtgatatattttgttcagaatgaaagaactctatcagtagagatacttaatttgaaggcaggttggaagcaaaataaggaaagttgtcaagaatgactccacagtttttaactggaacatctagaagttagaatcaagacctactgatgaaaatactcagagagtagaggtctatagaaaagatcaggagttgagtgtttgtaagcacagaaccatctctttagcctcaagaaaaggaatctttaaagagactgagaagaaattaaccagaagaccataaacctagaaaatgtgtcttgggaactcaagggaagatcgttgtttatactagaggaagaaattgaaattttactgataatagaatgaatactagaattgaaaattgtgtttagcaatgtgagtaccatatattattatgaagcttttagtatgaaaggccagactatagctatttacatattcttttttttttaaagatttatttatttatttatcatgtatgcagtgcgtgccagaggaggacaccagattacattacagatggttgtgagccaccatgtggttgctgggaattgaactcagaacctctggaagaacagtcagtgctcttaacccctgagccatatctctagcccctatttacatattcttaaatggaaaattttgatgctaatagtatttcatttgtcttgttttcaggtttgctgtcttattgatgatatgtctgacagtggatcacagcttcattcagtgggtagcttgaccatgaaatcacaacttcagatcactggtaagttttttttttgaattttatgtgtattagtgttttgccatgggaagtttcaggtctcctaaaactggagttacagacagttgtaagctgccatgtgggtgctgagacttgaacccaggacctctggaagagcagctggtgctcttaactgctgagccatctctccagcccccattagtaagtcttaaaaaggtacaataccttatatctctgactctcctattaaaaataatcttggtgactggagaacagttaagagcagacccttgttcaggttccagtacccatatcatacatggaggctcacaacttcaactccagaggatccagtaacctcttctgacctttgaggatatctacagctatatgtggcattcatttacatacacatagatgcatctaaattttaaaaaaaagtctaaaatttttctttttttaaatctgagaacaaactctttagtggacattataggcagcaaatcagtatttgatgaatacatgaacagaatgttgagatacataaaaataattttgcctcaagacattttatagattcattctccttcattaaactggtatctaggtaattactcttggttattaataattttattgagttataaacagaattgatccattatcaccacaaccaattttatttaccctttaaaattttaattttgagaatttcatacataagtactgcatttccatcatttccatccctctccctctaactcctgtgttcttccctactcaaatgtatgacctcttctttaattatgtttttttacatacacacacacacaccacaaaacacacacacacacacacacacacacacacacacacacaccccacaaaacacaccctactgagaccacttagtgttttgttgttgttggtggtgatggtgtgtgtgtgtttagggctgactacttggagctggataacttaccagggtgctcattcctagagaagactgactttccctctcttaggtcattaattgtctatggctcttcatctacgggtgggtcttggaagatttttccctaaccacattggtgttggctgatattgtcattgtgaagcttttatttaggggacaatattgttgagatttcatgggtacaatttctgtgtcatatatagaagacactgtcttgcagctgaagttcacttgtctggcttttcaaatttttttgctctctcttctgcattgttctctgagtcttaggtataaggttgtgttgtagatgtagcaattggagttgggcaccctatgattaattattctctgaattttgaccagttgtggatttctgtgatggtccctatatgctacaaaaggaagctacttttgtttatttgttttttgtttgtttttttgagacagggtttctttgtgtagctttgtaaaccaggctggccttgaactcagattctgtctgcctctgtctcccaagtgctgggtgagtgctgggattaaaggctttcgccaccaccacctggctgaagctactttgttggagggtgaaaaatacatttatctggatataaggataagtaagtacctagaatgcaatatggatttcaggaaagttatagtagtagtaggttttcctctaggcttcatgacctcaccaaccacaggtagttggctgggtttgtggtagcaggcatgaattctctccaattgagtgggccttaaatggctgttagttacccctaagatgtaagtgttactattgtacccttgtgggtatctggctgtgctggtcattgttatggttcaaaggctttacatcagggtaggactgttgattgcttttctctcctagcagcctgcttatcatctttggatactatgagagctagtccatagggaggagacttccaggtcagttccagcttgattcttccaagtcctgtgtccaaagtgagtgtaaggtcttgttttcaagttctgagagaccagttagagcaatggcaacagcccttactgttttgggagtcccttggactcttctgaccaacagctgaaaaggaggttttctatgtttggtctgggacttttgttagatgtctattgctcttagggggagcattatcaccctaaagggcataatttcatttaagaatatgtttatgtatgtacatacacttatatataaatgtacatatgagctatatgtaaatacttagttatatgtgttatatattaagtcaacataaaatgtttccttatgactttctcaaatctccttagtcttatttatcccttccctacttaaagtgctttgcccttcttttttctctcatttcctgctccatagaacccatgtgctactattctcctctttagagctcttcctacccactccacccccatgatcccttgtactttcttggtttctgcagctacacaaaaaattatatactcatatctaaaaattcagagatggatccacaagtaagagagaacatgtagctgtcacctttctgggtctgggttagctcactcaggatgattgtttaaagttctatccatttatttacttgcaaattgcatgtcttttctttgcagtgaatagaattctattgtataaatgtacaacgttttcattatccattactcagttgagcatttagattatctccattttcttggtattgtgaatggagcagcggtgaaaatggcttagcaagtatctggaaagtagtttgtcaaatcctttgtgcatatgccaaggaataatacagcttggtcctaagatatatctactttttagcttttagagaattctctatgctgattttcatagtggtggcatcagtttgcagtttcacccacaatgaagattcctctttacccacatcttccctagcattcgttatcagttgatttgtttgtttttgttttattttagtcgttgtgattggggttagaaatctcagagtggttttagttttcatttcccaaattgctaatgatgctgaacactcctcccttcctcccttcctctcccttcctctcccttcctcccttcctctccctccctccctccctccctcttgatggagtttctctgtgtagctttggagcctgtcctgccctacgttctgtaaaccaggctggcctcaaactcacagagatctgcctgcctttgcctcccaagatgctgggattaaagacttgagccaccaactcctagcttgatccatttttcaacataggtgcttagagttataaacttccctcttagaactgcttttaatgtgtccccaaggttttgttgtgttttctttttcatttaatatgaagaaatttttatttctttctagatttcttcctaaactgcttctttgactgatccatcattcagtaatctgtttaacctccatgaatttatgcaattactagagaaccatttaatgtttattttaagctttattacattgtagtcagatagtatccacagagtctttcagtttttctgaatttgttagcatttttgttttgtctcctgagtggtatattttaaagaagtatccatgggctcctgagatcatgttctttggtgttaggtagaatattctgtagatatgttaggtccatttgatgtgtcatgttgttttttttttttatttactttgtgttttgttttgttttctttgacaaggtctcctagttcagtctggtaccaaatatggtttgcaaccaaggatgaccttgaacaggggttcttttgcttccctcctaagttctgggattggagacatgctgccaagcctgctttagccattttagaatgatttttgtctctccagaaagaatccttatgtccattagcatcacaaaccatttactcttgtgaatagtaaccacaaatctaggcagccacttaatccactttttgtggatttggatctcttttaatacaatttgtgaccttttgtgtcttctttcgcttagcatgttttcaaggctcattcatgttgtagtatatatcagcacttcacttctttttactgctaaataacattccattatgttaatgtataatattttatgtatttcttacttgatggatgtttggattgtttctgcttttatttatttttacattattttatgtgtgtgtgtgtgtgtgtgtgtgtgtgtgtgtgtgtgtgtgtgtgtgtgtgtgttcatttctatgcccatacaagtaagtgtgcatatgtatagaagccagtggacaatggttctctccttccaccatgaggttctttggatcaaactgaagtcctcggtaagcgcctctgttctctgagccatcttgctagagttctattttttatctattatggataatactctataaataatgttacgaacatttgtacagtttttgtggggttgtgtgctttcttcttacttggatgtattcgtaggagttgaattgtttgttcatatagtatccatgtttagcattttgagaattctaggttgtttttcaaagcagatgcaccattatgtaatttcatcagcaacataataggtttctaatttcttcatctcttcccaatacttgttgtctgtcattttgattgtacctatcgggttagctgtggttttgttttcctgatagctaatgatgttcagcatgtttttgtgtacttgttggctacttttatatctgttttgggaaaatggctattcaaatcttttggttcctgttgttaagtaacatcttactctttgtttatccctttagccatactgtatatcattttaagattaatattttaacatgccaccccttaggttatgtttctgctcagaaacctgcattgcttcttttcattgaggtgtagaagttttttagtctttgctatgatttttctacactgtagctccatgtggtcaagatgagatgctagatttttttaaggcaaagtaggtacctatagatttattatacagtgatccccagtctctttccctttaacatttgttgattatagaacactccacaccctggtgtattacttagtttctgctattcctggtttatatcatcttctagattgtgaatgtgttaggccacaaaccgtatccctttttaaaaattgtgtgtttatgtgtgtggcctccaacacatattttaattgctgcattcagtccatcaaaatctgagggcaaactgggctacagtgtcacatgcctttaatcccagcattctggaggcagagacaggtggatctctgtaatttgaggccagcctgatcaatagagtgagtttcggtacagcccaggctattgatatgaagaaaccctttctgggggtggggtgaggggggagtaacttcttgatgatatcacagttattgtctctagccattttaatcttttgtctaaaagttccaaggatactcaaatacatgacttaaaaaaaatgagcaaagcaaacaaatataataagggattgggaatatggttcaatggtaaaagtgcttgctatgcaaatatgaggactctggagttcttttccccaagagatccaagtaaattctgggtggctgtggtagcctgcctgtaattcaagccttggaaggtggagaagttagcaagagcagccatatcagtccactgtttaattgagagaacttgctttaatgcataaagtagaggagcgatcaaggatgatttccatcatcaaccttgagccgtcaaatgcatttatacacacatgtatagttacccacatacatgcaaagacttatgcttagacacttgcacacaccacacacaagaaaaatggaaaaacaaaaataacagataaaattattttcagcaaatatatcatgtatttttcagctttctaatactgtaacaaatatctgagataatgaatttataaaaagaaatggattgagccagtgatggcttagtggtaaaggcacttggccatgaagcctggtgatctgagtttaatctatagaacccacatggtggaaggggaaaactatttcccttaagttgtgctctggccttcacacttgcaccgtggcacaaacactccttccaacaaataaatataatgtaaaatgtaagtatatatatatgtgaaatataagtaaatgtacatgcatgcatgcatacatgcatacatacatacatacatacacaaacacatgggttttaaatctactgttttagttagggtttgtattgctgtgaagagacaccatgaccatggtaactttttcttttttgagacaaggctgtctgtgtagccctggctggcctggaactccttttgtagaccaggctggcctggaactcagagatatacctgtcttttgcccccccagtgctgggattaataaaccttccccgcttgatcatggcaagtcttataaaggaagacatttaattggggtttgcttacagtttcagaggttagttccattgttaccatagtggggagtagggagcatggtggcacagaggcagacatggtgctggagaagtagctgagagttctgtattcagatctgcaggtagagagagaccctgggcctgaaatggcctttgaaacctcatagcctgcccccagtgtcacatttcctccagtaaggccatacctcctaatccttctaattctttgaaatagtgccacttcctgttgactaagcattcaaatatgtgaacctatgggggccatttttattaaaaacaccataccatgtcccatgccagctttgtgtgtgtgtgtcatacacacacacacacacacacacacacacacacacacacacacacactatattagcggaaaacaaatgatttggccatgctagaaaattatttgatctgtgggaagtcagagatttatggccctcccctgggcctgtgtttgctctgttagagtgcatgttgtgctgcctgggctataaactcattttggccaggcatggtggccatgctcatggtcctggcactggctatgggggtggggtggggtctcttgatagttgtttgagtatctgatgtgtagaagtcctaagtgtatatttactaagataggaaaatacaagaaataaaaatattataaataaataaaattaataatattttagaaaacagctgcttctaaataaaaataaccagctaaatctttaatgaaatggcattaatcaaggaataaactaatatttcagatgttaaagtatcttctcttttcttttacagtcatctcagccaaacttaaagaaaataaaaagaattggtttggaccaagtccttatgtagaagtcatagtcgatgggcagtcaaagaagacagaaaaatgtaacaatacaaacagtcccaaatggaagcaaccccttacagtgtaagttcctatacttatatatacatgatacttgtatgcttgtttatacatgagcagagatgtgactccaatatgcctgtttctttgcatccccttttcttttttacctttcccacctgctcctaggactcgttcctctagtttactttttgtttctctttagatggtttcctgtctcttctggtctgtcttcatcttctccagtttagttggtgtgatggtatcactgtagccattgaagacaagtgggaagaactctttataatagctgtctctcttaattttagttttgtaaaaaagtcatacattaattagtattatatttacatcattataatagcctttaagaaagattttattttatgtgtatgtgtgttttgcctgtgtatgtggctatgcaccaaatgtgtatagtgccctaggaggtcagaaaaaggtgtcagatcccttggaactggagttacaaatggttgttagccaccatgtgtatgctaggaagagaatccagttcttctgcaaaaattagcaaatactcttaatccctgagccatctttctagtcctagtagcccttttcttagattggggctgaatcaggttcagagattaactcactggtttttttgttttgttttttaaaaaaaaccttttgttttgttctgttttgagacagggtcttgcttcatagttcagatttgcctggaacttgctttgtagctcagattagccttcagttctttatccctttaactcaagcctcctgaatgcctgtgcttctgtgtgtgattctatgtgtgcttctgtgtgcgcttctgtgtgtgcttctgtgtgtgcttctgtgtgcgcttctgtgtgagcttctgtgtgcgcttctgtgtgagcttctgtgtgtgcttctgtgcacagcacttgattatttctgttttcctttttgagacagggttcaatgagtgctcaaatgtgtcaggttgtactaccaatatctgacattttgtcagtaagtattgaaaatgagtgctatcttatttttatgaatttattcagcacataaaaattaccagcatacatgcacacgaatagctataaattatacaagcctagtaccttaatattagcagctattagacgacaactactataggacagaaattacatacctacataaaggatattagatgtgtatacactcagctgcaactgtaaccacgatatgattatataaaagcagagttataggagctggaaagatggcaaagaatgtaaaatgcttatagtacaactccagcgatctctgagtttagtccctagagcccacaagaaaaatttggctctacaaagttgtgtcctaacttcatgaataccacagcatgcaccccctcataaacacacacaaaataataacaaattaatttaaataaattaaaataagggacagagggtcaactcttaaaagactaaacatacttcaaaggaacagagtttgattccagctccaggggatctatggctctcttctggcatctgaagttacccacacccacatgcatacagagatgcacatacacataaataaaaaaattaaaataaagtattttttaaattaaatttaaattaaaaataaataaaaacaatgctatagaataaaatatatggtataactttttgtcatatataatatcttaaaaatataacaaaattaaattttggtttgcaggggcactatgattgcacaatacaaaactatttctttttttaagatttatttatgccaggcattggtggcgcacgcctttaattccagcactcgggaggcagaggcaggcgagaatcgggagttcggggccagcctggtctccagagcaagtgccaggataggttcaaaagctacacagagaaaccttgtctccaaaaaccaaaaaaagatttatttattatgtatacagtattctgtctgtatgtatgcctacatgccaaaagaagacaccaatgtcactatatatgattgtgagccactatacatggttgctgggaattgaactcaggacctctggaagagcagccagtgctcttaaccactgagccatctctccagccccacaaaactatttctttaaacagtgttttacaatgtggtccaggtatgcctaatacttgtaaaccccctatcttagtctgagaagtctgggattgtacgcatgtactgccacacccaacttatacatgcatacaaaaccctaatttaaaaaaaatagagttgtggggatggtggcgcatacctttaatcccagctctcaggaggcagaggcaggtggatctctgagtttgaggccagcctggtctacagggtgagttccaggacagccagggctacacagagaaaacctgtctcaaaaaagaaaacatcagtaacaacaacaaaaatgcaaattgtttttattacctgatatttgtaactcttgattttgtttcatttaaataattaaactagcgactagtaaaaaaaaagatttcttttaaatgtcaagatgagaaactataaggttttctcttcaaacaataaattttacttggttatatttattcccagtaaatatcaaaccaattgttatacctataatatgaatgtctgaagtcctaggagcattttgatgtgtctaatgataattttaagaaaataaataaagtttaaaaattacatgcatgtgatcttcttaggaggatttaaaatttcagaccagccaggtctacatagtgagtactaggccagccagggttatgtaagtcggaccctgtcttaaaagacaaaagagataaaaataaaattgaattaataagaatttactgaagaacaatttagattttgtttgcagaattttcttgatcttttaatttatgttgccttggaaacagcattatagagtacattctttatggtgtgcttttgccaagcatgaggtatgtgcttctgtcttgagacagggtctcattgtgttgttcagtcttgcacatctatatgttatggttatcctggtgactttgcctccagaactgtgaagctttgtgtatctgttttagttttcaaaatgaatgatggcctgtggaacttttggtgtattccagtagaatttagttcagatttgagctagcttactagctggatgaccttggcagtttgctcaacttctctgagggcatcatttttagtattaattctcatatgacacacttactgtttggattaatgaagttaccccaagttcagtgaaatgcatctcataagtaagaattcaatttgtaaattcactaacttcaaaaaatgaatttaaaaattgacatgtaaagttatgtatttttctggagcatattttattgtttcactaaattcactcctttaatagtttgttaccttataagcagttttgtttcgtgtgtgtgtgtgtgtgtgtgtgtgtgtgtgtgtgtgtgtgtgtctgtgtctgtgtctgtgtctgatcttacaggccagttgcattcaaatacaggtttcttgaggtttcagggcataggccacctggctaatagtaaactttaagaggcccagtgagggactgcctacatagctcagtaggtaaaggtgcttgcctccaagactgataactggagttaggtccctgagacctactgggtggaaggagagaaccaactcctgcaagttgtcctttgaccccccacatcccactaaataaataaacataatttattttaatttaagaaaaagaggtacaatgaaaagattttagatgttaaagcttgattgtaacttattaaggatctcattgtgatgtttaatgaaaacaatgtttccctgtttttttattttcagtatcgttacccctacaagtaaattacatttccgtgtgtggagtcaccagaccctaaaatctgatgttttgttgggaactgctgcattagatatttatgaaacattaaagtcaaacaatatgaaacgtatgtatgtaagagttacgtaaaatgtactgtgcttgtttttggaagaaatgtatgtcagagtaacataaaatatactttgttggtttttggaagaaattcttatgttaaacatgtggaacagctcacatcattatttgtcttaaaatttaaatgattattgagctgggggtggtcgacacacttaattgtagcatccaggaagcagaggcagatggatctctatatatattgagttccaggccaaccaggtctacattgtgagatcacagtaaaacaaaacaactacaacaaatatccatgtggttttaaggagtgacagaaaagtgttaaaactatttaaagcattccaaataatcttggttttggtcattcattttggagatactattttagtaaatatttatttccttaagtatcaataaagtaatacatagtaaattatagagaaactaaaagatttaaagcagtcatgaaggaaaaaaatagttgagaaagacaaatgtgctgttaaagttataggtagatttctcagcatttgtttctgctgcttaattttgaagtttccttgttttaggtggttgttttattttcatttataaagtcataactcattttagttagatctcatattttaaatgtgaattgttttttgagcccttgacataattctaagaacttgtttctttatttagatctttatgatatataatcgatttttaaattatgttttcattcaatatagcccaagtttatattgataaatgatctttgtttttatgctggtttgatttatactattgttttttcaaggggggatgactataataaacaatatggactatatttcttgttatatatgttctattaagtattatatatattggtgaagtttattttctttttaaaaagtaatgttctggtctcaaaggtccttaaacctttgtccagtaaaacagtttacgaataattgaaagtgtgatgtttcttgtataatttgttctttttcagttgaagaagtagttatgactttgcagcttctaggtgacaaagagccaacagagacaatgggagatttgtcagtttgtcttgatggactgcaagtagaagctgaagttgttactaatggtgaaacttcatgctcggaaagtaagtgattacttttttgttgttgttttttcatgaaaaagtttccctgtgtagccctggctggtctggaacttgctctagagaccaggctggcctcaactcagaaatctgcctgcctctgcctccagagtgcttggattcaaggtgtgcacctccacagcctggctaagtggttacatttcccctcctttttttttttttttttttttttttttttttttttttttnnnnnnnnnnnnnnnnnnnnnngtttttcaagacatggtttctctgtggctttggaggttgttctggaactagctcttgtagacaggctggtctcaaactcacagagatccacctgcctctgactccctagtgctgggattaaaagcttgtgtcaccaatgtccagctccacctccttttttaaagatagtaatatattgtgaagacaaggctggtttgtctctgtctctctctctctctctctctctctctctctctctctctctctctctatctatctctatctctatctctatctctatctctttcgtgtgatgagtggtggtggtagtacacttacctatgcatacatcagtggatcccaaaggttgacatcaagatgtcttcctcagtcatttgtctgcctttaaaaaaaatatttttaatagtatgtaagtgtatgtttgtctgtaagtgtatgtaatgtgtgtgtgtcccctgagcaatctgatggagctaggtggttgtggactacctgttgtggatgctgggactctaactttggtccttgcaagagcaatatgtgttcttaattaccaagccctctctccagcccctgtctgcgctctctctctctctctctctctctctctctctctctctttctttctctctgtgtgtgtgcgtgttttgagacaggatttctcacaatcctactttgtctagggtgtctaaccagagagccccaggatccactgtttccagccttcttcttactgctgggaatataagcatgtgctgccacaccaggtttctgtatggatgctaaaaatctgaacctgggtctccatgcttatacagcaaactctttaccactgagcatctcgatagtactaggttggtcttgagatcccatctcttgccttggccttcccagtgcaggaattataggtagacacaggccagaatgcccagttcagtcactactttgtggttaaggtctcttatgattcttctgacaaacaatagccagtgtggtatttgtaattattgttattactgttcttttctccagagggaaaaaaaaaagtatttattttcttttttaaaaggtattggtctaggaatatagcttagtggtagagtgtttgcctagcatgtatgtgaccctaaattcaattcccagtatcataataaaatacataataaatagataccgatcatattaaatactttgttttgttgcaatgtttctataaattttttaaaaaatttcaagttaaaaagctggatgaataaaagttgaatcacactggacagtggtgttgcatgcttttaatcccatcactcaggaggcagaggcaggcagatcttggagtttgaggacagccttgtctacagagtgaattccaggtcagccagggataccctgtcttgaaaaacaaaataacagcaacaacaaaaacccccaaaatcccaggcaaaatatttttgtgctggagacatggcccagtggttaagaacactggctgctcttccagaggacctaggttcaattctcagcacctatatgatagctcacaactgtctgtaactttaattctggggaatcctacaccctcacagcaacatacatgcaggcaaaacaccagtgtatgtaaaaaatagatataaatcattaacaaaagttgaatcacagttggtctgtgactattgaactgattgataaagtatatcctggatgctattcatgtcagctaatatggtctcctccattgccagtggtgggtttgtgttgccacccgcagcagtggctgcttgagtttaaatgactccagtcctgtagtacttgacagtcaggacaagctggagtccatttgccatttccactcccattctgtgagccacacttcacagggatatcttctgtgttattatagttaaaagcctgattcattttacagtttgtagggtataccggtttgtgttaaagtggagttaaccatagtaaggaactttccagtaacaccttatctggtattgtcttaagtaaaacttctttccagtttttttttttaaataatttttttagatttatttatttattatgtagtattctgcatgcatgtatgcctacaggccagaagagggtgccaggtctcattatagatggtaatgagctaccatgtggttgcccggaattgaactcaggacctttggaagagcagctagtgctctaacctttgagtcatctctccagtctcccccaccaccaccccagtttattcttaacagatatttctctcatttagtaatatactaaattattttaccattttaaaaattttaacccttttcctgcttcttctctgcactctattctttttcttttcctcattcctctttttaaaaaatttatttatttattatgtatacagtcttctgcctgcatgcctgcagagggcaccagatctcattaggtggttgtgagctaccacatggttgcagggaattgaactcaggacatctggaagaagagtcagtgctcttaacctctgagccatctctccagtcctcccttttttttttttttttttttgacaaggtctcactatatagctgtcctggaacttaactgtgtagatcaggctggccttgaactcacagagatccacctgcccctgcctcctaaggactgggaataaaggtgtgcgccaccactctatttttagaaccaaattaatagtttggtatttggtctgagaaagacttgtttacttagaactgaattataaagtagttccggtgtgaccctctgttgcttcgttggtggaggactttctctttagcacaactttttttttacagcaggaacttgaagatagttctgaagaattttctacactgtttttaaattacatttttcatttattttgtgtgtgtgcgcgtgcgagtgctcagtgagtgtgtaggagtgcttgtgccatagcatgcatattgaaatcagaggacaaacgcatgagagtcagttctttacttgtaccatgttggttctgagcattgaattcagctcattaagcttgatggcaagtgcctgaatggactgagccgacctgtgtcctgcctcttttttttttaaagaaattataaagtagaaggaaaattcagaattgattatactgcttccgaatttgaatgttattaacaggatctgtaatagttacattgacatacacacacacacacacacacacacacacacacacacacacacgaacgataaaatatagataaatcatattgctaagcttggaatcaagcccaggttctctgcaagagcaacaggttctcttgaccactgagccacctttctagcccctatagtctttgttttgatttttcaagacagagtctttctacattgccttagctgccctggaactcactaagtagagcagactgtcctctaagtcagagatccccatgcctctgcctcctgagtgctgggattaaaggtgtgtgccaccacacactgctcctttaggattttttttttaagtgacttacgtttcagtatttttatgtgctcaaaatattagctaacttgctttcccccaaaggacaacagaattcctttgtcattgttatttattttattttatataagtgttttgcctgtacatatgtatgtgcacctgtgtgtgtctggtttccacagagatgagaagagggtgttggaactatgactaccatgttggtgctggggaatggaactcaggttctttgtagaaacaatatgtgctctaaactgctgagtcagttttcctgctcctgtgtttatgtttttatttgacatgatgggtggtactttaaaaattgaagcagttaggctgtggtcatattttttaagtaggacttgtaccatattcattaatttttttcaatttacaaagcacttggatttgcattctcctatttagtatgtgtttgaggtctaagcccacattataaaataaacactcatgaaaactaccacacagtctatatattaaagacataaacagtgtcattgaatatatctgtatttttccttctgtatcatttcttatgtttttttgtagtaataatttttctgaattctgagttaaaaaataaacagtatattacttgtggttttttaatcttgttccttttgtttgtttgatgctttttttttgtttgcttgttttttgagaccacatctcagataagccaggcttggcttcaaaatcactattacagctgaggctggattgaattcgttctcctcttacctactctgcctacattctggggttataggtgtttgcctccacacctaagtatttcttgagctatatataatatcaatattattttttgagtttatgtattgttgtttctgagctcatttatttttcctgttttataaaatttgttaggtaaacatgctagagttttatgtcaaattatgtttgggtttttaagtttttgctgttataaataatgatatagtagatgcttcttgaatatctattgataagctttcttagagattatatccttaataaaacttttagggtttaatgttaagtagaatgaactggtatgttcatttacagcttataatatttattgcttcttcaggtatgttactttttattgtttaggtgtttttaaattaggtgaaatttatatatcatgtagttatcattatcaagagagtatgtttggcatctctgtacattgaaaactggaaccctagaacaatactgtgctttctcctttacccagtccctagtaaccttactcatctgtttttggtttctggatttccacattatgagaatatattatacatattatttacttttctcatgagtattgacagaatgtttgtcataaacaatttaaaggaggattttcttattttagctcctggtttcagaagtatatgtctaccacaacagggaagactatgacagaacagagtaactcatattatgggagtcaggaattaaagagaaagaaaaatagggaaaggtcaaggaagcacattatcccaagaatctctgtgctccatgacctacctcgttcaagtaatccccattacctgcttcccgccacctctcatatcctctatatccatcaagggattaatcaattcaccaagtcagatgagctcatcatctttggaaatgccatcatttgttggtactttactagcctcataggcatttcttaatccagttaagctgacaatgaaaagtaactgttgcatcatattaaatcatagctgaatttttgtgagtgtatgtgatgtgtgcacatatccatgttggtgtgttcagctgtgcacatggcagctaggggacaacagtgtttgtcctctatcatcttgtcttgttctttgaggcaaggtcttccgttatacttggagctctggtattttggctaactgaccaccagtcatgtgccaccatgatccatacattgtcttttaatgcatgattttcctctgtatttttagtttaataattctactatctaaaacctgtggggatagaaatgattttaaaagttcttgttgttttcagagtcttgatatatagtactgactgccttggagcttactatgtagactaccaagatggcctcaagtttgcaatagttttcttgaatctgcctcttgagtgctgagtgctaaaattataggcatgcaccaccatgttgacttagaaatggtcatgtctttcccttactggggctcattttgatttttattttatgttctttgattgccagtttccattttatcttagtctaccagaattttaaaggcttaatttgggaattctttactttagagaaaatgtcttttgctttaggtagtgccagggtttgctgcaacctaaaaacgttttatctgctttctgcggttcctagcttaatgttcagcacttcccaccttgctgctgggctgagactctctgatccacctcagatctggcaactgccacaagataaaaatgttttcaaggtgcttctagtttggtatatcagatcaagtttttgttcagtttggagattgtctggccaccaaggaatatgaagtgcgttaaatttctttagaaaccagttgttttgtggtgggagtgctcttgtaatttagctcactgagacgaaatctttgtagcttttccagattttcctgtgggtaaaacatgttcagttagaattttgatatggttttcttgtcaccttacccttctccaagtgaccttatttatgtattatctatttattgtgtgtgtgtgtgtgtgtgtgtgtgtgtgtgtgtgtatgtgtgtgtgtgtgtgtgtgtgataagcatatgctgcagtgcatgtgtagaggtaagtagtatagaagacaatttttggagttggtttcatctgctgcctagatgagacaggacttcttttggctgctatgctgcacactccaggcagctggcctgagaaattctaggcatttctgtctgcctcccattgtgctctaggagtgttggattatagatgcacaccactgtgtcttgatttttcatgcaggctccagaattgaacccaggttgggaggtttggcaaatgcttttacctgctgagctaccctctaccccccattcccagtgacttttttatttgtggaagaaatggaatactgatttgattgactattgaatgccatatatacattttttggtatagttttctcattccacttatgtcctacatatcaatcaatcataagaaagtatacataaaaaacattgtttaattttattttggtacagtttcatactggagctcagactgacctgtaatcttactgtgtgtcccagactgaccttggattcatggcagtctcttggtgagataactgatgtgaatttttgcacctggtgtgtacagtgctggaactcagagtcagggttttatgcatctttaaacaagcattttaccaaggtagttttaagcattctaccaagtgagttttgtcctaaactctgttttggtttggcttttttttttttctttaagattataaaactcgtctttaatcaagcttgtaacatgtaacagaattgtcagataaactggaaagtttccaatatattgaaacaaacccataagtcaccataaatacaatacccaaaataggaaaaccacaacaacaaattcatacttgctctgtaacagccatgaacaatccagacactttctcagtgtagcagatgtggcctgatggatatggaccacactatggctttggggtcacacatatctgatagcactgtggcattgttggcttgactcatgaagcaatgcaggtcccagcacattcaaacagtggattgaatatgctttaaatattgaagtgaaaaggaaagcaacataatcatgctgtcagaaagatattagagagtaaggacagctgtgtaaagcttgaggctgagaggtggctcacagcttcatttctttgacttcttggataatggctgcgagaacagtaagatgtgaggttctggttcatgggtcacccattcctgactgctgaatgccaaaatctctccagtcagattcagacatcacatgggttctaggaaccagcatggctatgtctttgggcaaactgacatgctggtatttgaactctatctatccacatgctaaatttgtttgtactgtgtgattgctctgtggaggtcactcaaccccctaccatcaacttccagagaacactatgtcatgtttgtagagatcactttaatactttattagactacattttatatgtcgtaagggtcaccatttcaaatgtgtaggtaatgactttttatagaaatcattatatttattacatgtgcttgtatgtatgtatgtagatgtatatagtgagagtatggaggttagagaccagcttttgtgagttggttctctcctttgatcagatgggttccaggaatcaaactcaggtcatcaggtttggcagcaatcacctttgcctgtcatcttgcccacccacatttaacatatttttgagataacatgtgttaatttgtttttaatactgtagattttaatgcagtttcaattacaaagcactccacaatttatctattccactatcatttttaaatgtgtatttctatcatccccagtacttataaaagaaaaacagtagacttctacaacccttgatagatgtggcatttggttatgtgctgtggtattgcgtactgtgattttattattgaaaccgtggctgcgtcttggggatttttttgccagttgcgcttagactgctcaacttgagttgttaaacagttttcagttttccttctctttctgtgaataaaattggaagaatacatgaatattaaggcatttatttgggcctctttgaaacttgattagtttttttttttttttttttttttttttttttgcgcggggttttctttttcagacggagtcttcctttcagagagttctttgtgtctttcattttctcggaggttttttttttccagctcttttatataaagagttattattggctttgctatttcagagttgttttatattgactgttctgttattgattagtacttttctcccatatttcagataaagtaagtagtaaaaaggtgtgtatgagggtgtacaacgagactgaggcaggaacatgagttcagtgccagcctgagctttgggaaaatggctaattactgggtttgaattggagcaaaaaacatttcaaaacaaaaaatgcagaagtagggtatgagtaatgcaccttaactaatctctcattgaataacgatatatatagaattgaatttgaacattgttctattttccctttaaaatttatgtttggatattccatactagaaaggtttaatagtttagtataaggcttttttttttgtttcagttgaaaattactctcttgaatctcattttgtttaaatttattgttcaaggtacttcacagaatgatgatggctgcagacccaaagatgaaacaaggtaggagttcactgattgcttatcacagaatgcagaaagaattaacttgtgttaattcatttaacttcaggtttagggggttggaaagttggctcaggagatctaatgtcttctggctttcagacactcatctgtacatatctatacatacacacaggcacacatacacatgaataaataagtaccaattttcaggttcagactgataaattgtgggccaagtatgctgactttcctgtgtgatcccagcatttgggtggttaaggcaggaggctatctgtgagtttaaagccagcttgggctgcatgtagatttgggctagcctgggctacaaagtgaggaaaccctgtctttaaaaaatcataaaaagttgagggtgttggtgcacacctataatctagcattttggagaaggtaagattaggaatgcaaaacctgctcgagttatgtgaaatgtagtctcaacaaaaaccatgaaaagggtgctagagagatggctcagcgacataaagagtacatgctgcttttccaaaagatccacattctgccagggctcatgtctggtggctcatacactccagttccagtgatccaacacctctttggcctccgtgggtgcctgcataaatgtatgtgcctacacatagacacaaatatacatacaaataataaatcttttaaaatttaaatgggagaatcaaaagcaatgtcacagatcataagagatatttacccagaagtgcatgccatactattgcattgctacagggagaatagatgacttagacccaagcacaggggaacatacctgggatcccagcattggggaggtagagtcaggagggtcaaggacaaagaccaactttgactgcttgagtttaagactagcctgtgctagtaaagggaaatagagcttaatattatggtttggaagttgggcagactagtacaagcttccatgttacctatctacttctgtaatgcgtagaaattttcgtagtaaaaatattttaaagaacagtgttggaacacttgcccagtgtgcccaaagccatggattccacccccaaaagggcaaaaacaaatgacacatagtttattaaaatcgtcaggaaaaccaaagtcataatgttctgtcaaagcaaatagaactctacattctttgaatcacagtatattaatctacaagtatactcttaggtaacttcttactgagaacaattacttataatggaaaagtagttttaatttcacatactttctctgtccttaaactttgtttgtagtcaagactgggctcaaatcccctaatcctcctgtttccatttcctgagtgctgtgtttacaaacatgtgtaaccctgcctggctagaaaaggtttgctaacatagatggaagcctaacattaagggaaggagtcacttaggaaaaggccagtacacacccaatcatgtatgattttggtgccttcagaacttgtttaaaggttcactatgggaactttttaataaatgacatcataaggtggtttctaaaaaacattggactttaattaaaggtgataagagaaaactgtaggaggctggagagaggactcagcagttacaagtactgactgcttttctagattacccaggttcaattcccagaatccatatggtggttcacaactgtctgtaactccagtacctgggatccagcacccccttctggctgctgcaggcaccaaacaccatgtggtgcacatacgtatgtgcagggaaaacatgtatacaataaaatactaaaaaaaattttaaaaagataaaaccataaatcaaaagggtaaaaaagagtcatataaagttatacatttgtttggctgtaaacatcttgtttacatgtcttttcttacacttgtgaaaccactgtagccatttgtttactaagttctttctgtcttcctaggtcaataatcatgatcatagtttctggggacagtgccttctgggtttttgggcttgcttacagagatcaagtggggtgtgtgcgcgtgtatatgtatgcgtgcgtgcgtgcgtgcatgcgtgcgtgcgtgcgtgcgtgtgtattggggctgattctcttgttctaccatgtgaattccaaggatgcaactccggctctcaggctttcccccacgcatctttacctgctgaaccgacctcctaaccctcaaaaatgtatgtagtacatcagattcttccccagggtttgataaagtacagattgctaggtctcattctcattctttcactacttgggtgggaaaaagttttcatatttaacaagttttcaggtaatgttaatgctcttaggctagattgggcttacataacctttgagattacagctgtaccagaagttttgcagtttcataatgtagtcaatttcatagaaaccctagtttactggaaataatgtcactcattttaatcttaccctcttttttttttttaagatagttgaatcttacttgtcttttgaaatttgtttgtgtttattagaaaaagcatacaatcttaaaatgtttaaatgtagtagtattaacattaaaatgtatagtcatggaaaaataacgtttgatgtaagtcttgattgtgatatagatatgcacatcttagaggaattgtggagaaggaggaatttgaaattgaaggaagaaaaaaatagcatggaggtagagagaaactggttttttaatagtgaatgtttgatcacagtgtttgactggagataggatatgaggtggtttgaatagatatggtgcccttagactcatgtgtttgaatgcttgccctattgtgagtggcaatattaggaggtgtggccttgttagagtaagtttgtcactgtgggggtggactttaaggtctcatatgctcaaactatgtccagtgtgggatatacggttcacttcctattgcctgcagctcctccagcaccatgtctgcctgcatgctgctatgttctgccatgatactaatgaacaaaacctctgaaactgtaagccagccccaattaaatgttttcctttataagagttgccatggtcatggtgtcttgtctattcatagcaattgcaaccctaagatgtttaaaagaaaaatgcagttggtcagattcagagtagaattggagttaacattgtttcttatgtgccatctactatgctgaaagtgatgaaaaatacagaaggaggaaggaacttgcctgagtttgtagtgtatgtggtatagatgaatataggaactgcttaatcttcaagagcctgaactcataactgtcatgctttactaccacctaaagctggtgtaatattacataagccaatgtttagtcattattacatgtgaacccttttattgttttttgtttattaagatatgatctaactatgtagctgagactggcctgcaactcagaagctccctacctctttctcttgagtgctagaattaaagatatgcactaccacatctaattgttacttatttcaatttttattttatgtatgtattattactcaatcctttctctaccttagttgttagaaaacaggatttttcactaaactggagcacactgatttggccagactggctggccagcaagccccaggcaccttcccatctctgccttcctagcattctctgtaggtgtcaatactgtgcctggcatattacgtttttttgtggattctggggacctaaactcagttcctcatgtttatgcagaaagtcttttactaacagagccatcttccccatcctgaatattatttaagtattaggtagattgttatatggctaaatagaggtttaaagatacccccttggaggatgtctcaaaaaatattggactgggattgatataatcagaattctataagaaaattaattttatttggcaatggtatgtagtgtagtttgtgttatgggtatgtcagcaatagcagggagatacccccatatgccactagctacttgaagagttctcttctctcttagggatttccatacagttaaggccccaccctgagtataaagggtttcaggatgagccagggtgaagtggagttagttggtgactgcttagacgtataggaaaaggaacagaatgtaactccaaggtgtgactatgggcttcttgagatagagttgtgcttacatgtccttacagtagctttgtatatgatcctctggctttccaagtctcattactcaaagtatataacttattagcaaggtttaaaattaagtaaagcttaaaatttaaataaagtttaaaaattaggacaactagatgacttgacaggtgagaaacatttggtgtttttttactctgaagacttggatttgattcctagaacctggataaaataggaagaagagaactcattccattaggtgtcctctgacctccacacatccagacgtgttcctccccacatgccctaggactcggacctacccccgccacacccaatggcttggatgcacctctccccacatgttgtacacacacaataataataaaatttaaaatcttttaattaaataaaaacacatgagctggttcacacatttctctcatcttaaggactcttaaaatgaacctgtaaggttgtttatgagttatgtactgtagattcagggacaagaggggaacattgtggtaaagctcatagttataaacgttctagtcctcgtaagcatagtgcatttgttgtttctaatatccttttaagatatctttaggaaaacacacattatctctcaaagcaatgtgggctctttgggttgtgtttaagtttcttgactaatcaacaggcaaggtaaagtagatctcaggatgagaggcccctttgccttcttgtgtcctctttaaagtttcctttttatattgcctccagtgaagatgggggaaaggaatcaatatagtagactaagaggtagatgaggtgggtgtggtggaagagtagaggagaatatgaaagcagtatcaagtggacttagaaattaacaacacctagaaggaagaatgacagagttagagagctgtatctcttgcattttgtgagagagtcccactaattacagaaattctgatttggagataatcttcagaattatgggatttgagatcctagagaaaaatctgaagaagaggaagaatcagagggtgattagaaatctaagtacaagatgataaaattagagtgacaagttagagaaaaatgtcttctaaatatggcatgatggggctggagagatggcttagactaagagtacttgcaaaagactcaggttaaatttccaacacctacatggtggctcatagccatccataacctcagctctcagggtccaacaggcacacattcatacacatagatggatgtaggtaaaacattaatacacataaagtaagataaatccaatctagaaatctacaaaaaaaaaatctaatctaaaaacaataagatgagctagctgggcatggtggctcatgcctttaatcccagtacttgagggacagaggcaaggggatctctgtgagtttgaggctagcctgatctacatagtaagttccaggcagccaaggctacaaagtgaggccctatctacctccccacccccaacaaagagatgggatagtactggtttgatggcataatatatttgtagttcctgtacttgggaggttgaggcaggaaatctttagtttgaggccagcctgggctagttatgagacaaagaccctccctgtttcattaaaacaaagcaaaacagtaacaataacagcaacaaaaagcccaaagtatttaatgacattgttaaatgctacagaagtcattatgatcataggttagttaatattctaggaaagctggccatctggcaaaagaaaaatctagcctttgtcccaagacaagagtaaatttcaagttgattttaaatagatttcaaaaaatgaagctataaaaccattggaagaaaatgtggctagttcattgtctagttcaagtcccagcaaccacatattctaattacatagaaatatgaaacttgctactgggcgttggtggcacacgcctataatcccagcactcgggaggcagagacaggtgaatctctgtgagttccagaccagcctggtctacaagagctagtaggatagcctccaaagccatggagaaaccctgtctcgaaaaacaaaaaaacaaaaacaaaaacaaaacaaaacaaaaaaacaaaaaaaagaaatatgaaaattgcatatttaaaaatattatcatggagctaggctgtggtggtgcatgcatttaatcccagtattcagaagtcagagagaggcaggtggatatctatgagtttgaggtcatcctagtctacagagcaaattccagggcagctcaggcattacacagagaaaccctgccccgaaaaaccaaaataaataaataatttatgttaattatatataaatataaatattgtagatatataatataaatattatatatgtatgtatatagcattgaaagcaaaaaggagaagccctttcacaccagtgtgctagataagtagccttggattgtttggcactcttatagatggtggctttcctagtaaaaaaatgtggaggggtactcatatgcttataggcaaaaggattttgaagaacttgatttcattcctgcttatacaaggcattctgaagcctttctaaagccatacctagtaattttgaatgagctcaagttcgacccttgagtgacttctcactgtctgtgtcaggttgttactcttctactgctgtgaagaaacactgtgaccaaggcaactcttagaaaagaaagaatttaattgggggcttgcttacagtttcaaggagttagtcctttatcttaatggtagggaacaggcaggcatgacactggagcaggagctgagagctttacatcctgatccataggcagccagaccgagagagactgggcctggcatgggtttttgcaacttcaaagctcaccttcagtgccacacctactccagtaagaccataccttctaatccttctaatctttctcaaatggttccactttctggtgacaaagcaatcaagcatatgatcctatggggcaattctcattcaaaccatcccaaggaattatataagattaacctgtggcctctttatttgataaggctgacctgaaattagaaaggaaaaaagacaggctggagagatggctcagaggttaagagcaccggctgctcttccagaggtcctgagttcaagtcccagcaaccacatggtggctcacaaccatctgttatgagatctggtaccctcttctggtgtgcagatatacacggaagcggaatgttgtatacataacaaataaataaataatctttaaaaaaaaagaaactttaaaagactatttctcaaattcctaaaataccaaattttgggtttcttggtgttcttaaatgaataaggaacatttattttgttcccttcctctctcccctccttgcccttcttatctagagtgagcacaaatggatcagatgacccagaggttgcagtattgggggaaaacaagagggcaaatgggaacaactctccatccctttcaaatggtggttttaagccttctagacctccaagaccttcgagaccacctccacccaccccacgaagaccaggtatatattccagctttcagtgctgttttaaaataatgttcctttggtaggaagggctgacaacacagtctccagaagttgcccatgttagcctcaaatgcttccttagcccagctggggtcatgagtgtgtactaccatgcttagtgttcttaaataatgttctgtttgggaactgatcgacagctgagtgtcaggtcattggtgttttgtttaagtagaatctgttaacataggctggcctcaaacctagaaatccttctgcttcagccctcttaagtgctgggattgcagatgtgacccaccataactggcttatagctttgtttttacatttaaaaacttgaccaagaatgatctttgcataggtgactaagaactgttttttctttaagttttccttccaggaatgaagttccatgtgagagtgctttattattaagaatgaaaatcatgtgtattatataaagtatgaacagtacagttcagttagattgaaacatctttatgtggttggcaactgtgacatatcttatagttaaaaatttggtttcttagtccattttatcttttaaaaagctgagtgggggcctaaagaaaaggactcaacagttaagagcaacaactgccttaaattcccatcacccacatggggtttactaccatccataactcctgtttcctcttctgacctttgcaggcaccaggcacacatgtggtgcacagacatacatgcaggccaaagacaaaatataagtgaatagatttgacaaaaaaattgttttaaggatttatttattatgtatactgattctgcctgcatgtatgtctgcaccccagaagagggcaccagatctcattatagatggttgtgagtcaccatgtggttgctgggaattgaagtcaggacctctggaagaggagccagtgctcttaacctctgagccatctctccagcccccatgctaaaaattttttgaagcttactggtaaatgatgatcagtttttaaacaacaaaaaaaatcattaaatgaacatatttcatgtagtaacaatataaacattatatagtagcatttatatagaatatctattttctgatcagtagcattaatcacttatcaacaacatcaaaaattagccttagaccttcagggtcacatatagaaggcagttttaaggacctggaaagtggtacccatggtttcctattctgaaggtttttactgggctacaagttgtaggtcagtcagagtacttgcctattgtgcatgaggtccttgtaccataaaaatcaaactaagtagttagtttatatttttatgaattgagaattatatatgctatgtaatttgatgagacctgtgtatctacatcataggttttacttgttatgtacttttaaattcttaaattaaaatttgatcatgattttagatttcagaaagcaaaagattctaatattttccctaaatctttcatagcatctgtcaacggttcaccatccaccaattctgaaagtgatggatctagtacaggctctttgccaccaacaaatacaaatgtaaacacaagcacaactacatctgaaggagcaacatctgggttaataattcctcttactatatctggaggctcaggccctaggccactgaatactgtaagtcaagctcccctgccacctgggtaagtaactgctaacatttgctttcagcttttacatgtattcattaattttaaaaagatcatgctacattctttcattaattgtcttttaagtaattgatttgggtgggggagtatggaatccaagaaagtttatcattttttaaatactacctcttcattttttgggaagcagaaaaaaaattgagctgggtatgttagcacatgcctataatctcatcatttggaagtctgaggcaggagtattattatgagttccagatcagcttaggctacaacatgagactatgtctcaaaaacaggttttttgttttgtttgtttttggttttttttttttttatttttttttttatgtgtgtgtgtgtttcaaggcagagtgttatatagccctcattgacctcaaactcactatgtagatgaggatagccttgaactactgatccttctgctatctatttctcaagtgtgaattacaggtgtgtaccattacacctggaaaacaaaataactcttgaaggactcctactatcacccatagaaagttaatgaaagtcaagtaataacatagtcatgtgactaagtggtgcttctctaggtagggaaaaagcaaataccttttaaaaatatttttattataaaatcatcatagcaagtaatagtttaaactgataaattagtttcataatcccattttaatttgtacttaaaattttttaagaattgtgtgtgtgtgtgtgtgtgtgtgtgtgtgtgtgtgtgtgtgtgtgtgtgtctactcaccttctctgtatgtgtaccacacgtggacagtgcttatagcatagaagaggacattggaagccctggaacttgagttataggcagttcagatccatctgatgtgggttctggatattgagccactgttctctgtaagaggagcaagtgttcttaactactgagccatctccccaacccctatttttaacattaatactttgatcaaattaaaagctcagtcagggctaaagatttagcttagtggtagaacatgtctagcgtgcgtgaagttccaagttttaccttcagtgccacacacataaatcaaaacaaaaattcatgttcagggctcagaatgccagccaaagttatttggctgactggtaaattaataaactcatagtgaacattttaactacggtcacagattatacttattggtaacttaggccattttcttttggaaagctatatggtcttttagttactgtactaaatagtgtgacagaacctgacagagccacttgagggagagattttgacttggtctcttttgttgggaactgatcttaatcactgtggcagttcgaaagcagggcttaagtagaagccagccgggttacagccctcaacaagaccttaccccagcaaccctctccctctaggtagaatctgtatcctaaaggttccacaaccttccaaaagaatactactagctggggaccaagtattcaaagacatgagcaggtatagtaggtggggtggcaagataggaacggtttatatccaaactgtactacatggcaagctaaattagaagatggtttgtactaaagaacacatgatctggggctgagagatagcccttgctactcttgcagagggtcggactcagccacctacagtggctggaaaccacccataactccagttccaggggattctgtgccctcttctgacctctgtgggtaccaggcatgcacatggtgcacgtatacatgcaggcaagatactgacacacattcaataaaataaatgttaaaaaaaaagtttttaaggtatggaacaatggcttatcagttaagaacactggctgctcttcagatgacctggttttgattctcagcaccttcacagctgcttaatgttgtctctacctcctctcttaggggatccgatgccctcttctggcttcgtggttactaggtacacatatggtatacaggtatacatgcagccaaagtacccatacacataaaaataaaaaatcaagtaatggttaaaataacaagctgtgagggtttactgctattctcttctctttggcaacaaacctgctcagaaaactagagtacttacagtggccagtctataaccctcatcctgtaatatctgataatgacatgctttgatttcagtttttctagaatgtaatcagaatgttgcttttcatttagctcagtttttgaggtttcagggcattgacactttctttttctctcaaattctcaagttctgagtatagtttgatcagattgagaaatttggtcttctgggtggatggtctggctttaaaatgcatgttatttccagagcaaacacttaggaaaaagaaacctcattcactgttgtgtgtgtcactcttggggcttcctcctctctttttaggtgataattcttgtctgcattttaattctttttttttttctttatagactaacaggctgattttctttagttacataagatggtcatttacagtgaaaagatgtagacaggattaaaaagccaaactaatacaaaatgtccttactagtctttgatttgtatttaaggtgggagcagagagtagaccagcatgggcgtgtttactatgtagaccatgttgaaaagcgaacaacatgggatagaccagaacctctacctcctgggtaagtgtatgaatttaaaaacaagtttatccagaagaacaaattgtatccatacccagtgttccctgtagtcctgctctccccctcctttctattttgttttatgttagacacagactagaaagaagagagctagagagctgactcccagcatgctgagggtgttgctgttgtgactgattttgtttttggagaccggagtgtcactgcgtatcccaggaggaactcagcttttcagccttgcaagttctggggttacatgcctatgttccatactgtgacgaatgattttttgcttttaacatttctaatttgaagaaccaacccacagttcttattgtttgtattttcatatctgagttgttttcccagctgagagccactgaattttaaattagtttctttttgtttgtttgtttgttttttcgagacagggtttctctgtgtagctttggagcctatcctggcactagctctggagaccaggctggactcggactcacagagatacgcctgcctctgcctcccgaatgcttcgattaaaggcgtgcgccaccaacacccagctttaaattagtttctttaagaataatcatttaactaaataagagttataataaccaaacatggtggcatttgcctgcagtcttagcatttgggtggtagaggctggagaatcaggatgtcatgttagaggccaacctgtgtttaaacctgtctcaaccctccatcccaggtaaagagttgcagtgcctgctatatattaagataaaaatccttgttattaaaactaatatatattaaaatcattgcaaatggttgagaaagttaagaacatgttggtaaccatggtattaagcatttaatgtgtatatcatataaaatgaaagaaaatacttttttaacccaaagggaatatatagcaaacacagggagtgtagtctcctctgaggttgaagattgctcaaaggttaaggtgttcgctgctcttctaggggttgtgagtttgattctcagcacccacaccagccagtttacaaactgcctataactctagctccatgggattcatttccctcttcttactctgtgatgaccagcacacatttgtacatacacacacatacatataaatacaaatctttagaaaaatattgccaggcagtggtggtacacacctttaatcctagcacttgggaggcagagtgtcccgacctgcaggacatcaacctggggcaagagagtcagggatagggaatggggtcaagagacacagaaagaacgaccacaagacaggattctgatcaagtggcaaactttacttttctgaagctagcttatgtagtcaggatatggggaggggcagaatgggttgtttgtcccccaggtgttagtgtaggcaggatattaggaagccacacagaggatgtttggctgggtaaagagtttattagtaagaggtccagggagggttgcctaggtgacggagcctgtgggtggaggactgggtcaagctgtttcttttcttgagctgaggttctaagagctgctatatgtaaaggttaactatgtgccctgccaagcatggcctaggatcttttgccaagcctggagatttggctcccaacagcagagggagaaagatctcttgagttagtatccagactggtctacaaagcgagttctaggacagcaaggctacacagagaaactctgtctcaaaaatccaaaagaaaagaaaaatattagtcttgctagctattaactagcattaactaacccttaaagaaatatatacctaaaaaatgtggtttgacttgttaaattagcaggtcatattaagtgtggatgaggaactctaaccatagtaatgctggcaatagtgtaatttgaacctactataaaaatctttgcagatagatatagatcaatatatataagtatgtggtatatatatttttcttggtaatcttacattatgaaataacttgaagaaaaaactttgttgtcttgaaattatcattttactacaagtaagtaaaaaggtagtacagattgctttttcctctgtgaaaatttctgtatataactgatgtctcccatgatgtttgcaggagtgtaaaggtcagtgggggagaaaaaagaaaactttttcctttgagactctgaatatgtattacatttaaaagacttcattgatatgtgtcacagatttttaaaagacaaaattgtaaaagcttcaaagttcagtttataaatatgaatgaatgagttcagataaatcagaaagagctaaggatgtggctcagtgatagagcactgataagcgtgtgcaaggccctggatttggtcctaagtacacagagaaaaatacttagtagtttctccaggtaaaatttgtcttacatgtttttccgcagatatttcttaaattagttgcttcttttctggtttagttgggaacggcgtgtggacaatatgggacgtatttattacgttgaccatttcacaagaacaacaacatggcagaggccaacactggaatctgtcaggaactatgagcagtggcagctacagcgtagtcagcttcagggagcaatgcagcagtttaaccagagattcatctacggggtaagcagcctattgatttattggttattgtaactaacaaagatcttcagtctttaagaactgcctgcatgtgtcatgaaaagcaccacaaaggttacagagtagggtggcaagtcagttgctgctgtaggtaggtattggtcttgtgagttgtgtcttttctgtaggtgttaaaaataaacaaaaaccaagttagagcaatttaaaattcatggacaagtttggaaagaattaaaacaattctaaagtagaactgcctataactcactagaaaatttggatttctagtggttaacccaacttaagtggttgcatagaaatgacagtggagttgaatcactgaacacttactgatgaaactactgaccgaattctttggtgtgttactctactgaagagttttcattccttatagtaatatactatacatgtttatatcatgtatgtttatgaagtatcttctttacaaagctggatgtgatggtgttcatctattacctcagcatttgggaagttgaggcagatgactcacttgagctcaagagttcaaggccagtccagacagtgcaagacacagctcaaaaacaaaacataaaaataaaagaaataaagtaaactgcccagacatggtggtaaatggctttaatttcagcactcaggaaacttgggaggcagaagcattcggatctccgaattctaggccatcctggactatattgtgagttccaggtcagccaggacccatggggcagggtagggtggggatagacaaacaaagaaaaacaaaatacataatttccttcagactgatacaatgataaatgtattagtgctttccttgctgtgtgatctgggaattttgtaagtcataatgtatcacagatctgtctgagaaaagtaaaatggtccatgccaaaataagttggtttgttggagtagtatttagaactaaaccaaagaaaaccagtactgccagaggcctgaaaaacctggcactctccattgcaattgcctcagtgtcatgtgatcttccctttagaatgcaccagggtaaaacgtctttacttttattccttagacattacctttcctccattttcctgctttttcttttaagtttttatttttattttgtgtgtgccagtgcctggatgtatgtctgtgcaccacatgcatgcactcagcagagggtgtcagattccaatgggttggactgaaatcacagctgcaagagtgatcagtgttcttaatcattagccatcactccagactctcttgcagttttctccgatctcattgttagaatagttaccaattactgatgtgacaagttcgtctttatatcagcagccttctcttcactgctttgttatcatcaagacccctttcactctagtaagtgttttccccaccactgcttctggaaacgtcactatattccccttcctagtgttacatagtgctagggattaaattagtttttggtgtgtgtgtgtgtgtgtgtgtgtgtgtgtgagagagagagagggggggggagggagagggagagcactttcatgggggtgattactgagagaggatatgtagacttagaccttgcatttcttgtggctgccaacactctactcagcttcttgcactcccccgggcatggatgtacaccccttttgtgtccttaggaacctctgtggcagtgacatggtgcactgctcataaagcacaaaggcacatactctccaaatcatgcaccacacaaatgtggtgtgcttggtgaggtgtccccagcactggccttgcctcagccttctccccctctttatcaccttctgtcagttagggcccagtgtgtatgggggggcagtgcagagccattgttgctgtcttcaaggctgtcctggctgccctagtctttttacattttattttgagacatagtttcactaaattcccaggctggccttcaacttgagatcttcttggctaagccttctaaacaactaggattataagcttgtgccagtcatatcctgtccattttctttttaggtctgttctgtggttttacattttagtttctgtgtaaattattataggcaaatttcttctaggtatggatccttaacttgcccactttttccaaccctagttctacatgaatctccaatggctttggagtcaggtacatctagttcctatccactgttactttgagtaattttggatgagctgcttaacctcaccaggaatcatttaccttttaagtgaaatagacatgcccttcattaccttgatggtgttttgttgttatctctgtactcccaactctcttctatagtttatatactatcttaattttatataacttttaagtgttatataatattacatagggttttcaaagatttttttttttttttttttttttttttaaaaaaaaaaaaattttttttttttttttttttttttttttaccaaaaatagaacttttctaagtgtgagtctgtaagaaaatgttgtattgtatatagcagagaatccatattggaattcatacatttgctctgaaatgatgtatttgttgtgaattatttgtctaattattcattttttttattctttttagaatcaagatttgtttgctacatcacaaaataaagaatttgatccccttggtcctctgccccctggatggggtaagcacatcagttttaatttaaagtctgttatttagaagattggcctagagaggcagcttagaatgttggtgaaacgtgggcagagctctaggttgagtcactggcactgcaaagtgaaaagaaacagatcattgatacaacaatctggcaggacctcagagatgctggtgcttagagaagataatctgtttcacaagattgcaatagtcatgttaactttcgcctccagtttctattactatcaccaaatacttgaggcaagatcctttataatgaaaagaggctctgttggggaaatggctcaagtcagaaagttgttggccatgcaaacaggaagatcttaaactgaattcccagaacccaggtaaaaagccaggcatgatagcacatgtctgcaatcccatgggggttgaagagaccaacagatccctgaagctcatttggtcagttaacctagtcagattgatgaccttcaggttcagcaagagacttgtctcaaaacttagggaagccagacatggtggtagatatataatccattttgaaaaatcccattgttttgtccttaaaatcatgtatactatgttggcagagttttccatctggactgcttgctgatcagctctgttccaccagctgctccccaaataagctcacagagacttaattacaaatgtttggctggtagtgcaggctcattttttagctagctcttgtaacttaaattaacccatttctattgatctatatgctgtcctgaggcttgtttacctcatctatgtacttttcatccggccaaagctgtcagaaaatctgactcaactaaataaaggcagagggatagtcagtaaagttgttgctgttcaagtatgagaagctgagtttactgtgtgttgccagacctggataatcttggagatacttgagaggatcccaggagtttgctggctgaccaggctagctgaatcaagtgagttgtaggccattgagagactcttgtctgaaaaaaaccaaggtaactggtacctgagaaggagcacaggtgaggttgtcctctggactcatatgcgtgtgcataatgagcttgtacatgcacatccacacccgctagtggggtggaagaaaggcatatgttcagatgctaagcttttgtgtgtgtgatatgacacagaaattataaaattgtagtcactaagtggtcagctttattttatcttagtttgaggggaaaagactattccagcattaatactgtgttttcattttgtttaataaagagaagagaactgatagcaatggcagagtgtattttgtcaaccacaacactcgaattacacagtgggaagaccccagaagtcaagggtaagaacttcattgtatgtgtggcttctagagattgcctacctacttttgactcatttatgtattctttcctcaaaaacctcaagcactaatcatctacataccttggaagaagaaaaaagattgcttttatgtaatgaaaagcttgagtttcatgagaatgaggtgggaatgagttggtacgactcactggttttcctgtttctaaaccaatagaattacagaactaaaaaaatactcttgtgtttgttgtagactctcaaaatatgtttatgtggtatatggtataatattttttacattataagaacttgctggttaacatactaagaaatattatcacaagtttgcctttttgatgctttgatgacagtatacaatgatttatgttattctgtgtacgaaagttagctaaggccttgttaaaaaaaagaccactcaaacaaaataattctcaggccagacatagtagcgcacacctttaatttcaccacttgggaggcagaggcagacagatgtctatgagcttgaggccagccagggctacatagtgaggcactgtctgggggtgggggagattgtctgtttctgttttcaaacaaaagcttacagtcttagagttctggaagctggaagtcagaaaccatggtgtcagcagactatatgcctctgatggccagggggaagaggtgctccagttctcctaacctagtggtccacttcctcctcttccctgtcttgttttctgaggtaaggtctctccatgcagctcttgctgtcctgaaactcactctgtagcccaggctggcctcaaactcacaaagattcacctgcttctgcttctcaagtgctgggattaaaggtgtgtgccaacaccgcccagcaaatagcttagcttatggcttttttttttttttttttttttttttttttttttttttttttgagacagggttttactgtggctttggagcctatcctgaaactagctctgtacaccaggctggcctcgaactcacagagatctgcctgtctctgcctcccgagtgctgggattaaaggtgtgcaccaccaacgcccggcttagtttatgtttttaaaggtatgctttgaatttgaaatacctgtttctaagtaccagcaaatattaattttttatacaactattatattaacttaaatatgttcactttcataaggatgataaagagctttaaggataaaacatttgattccccagtaaaattgtatctgggctgcacatgaagctcagtgatacagtgcttgtctaatatgcatgatgtcagcatttgatatctaacatcaaatccatggctttgatccccagtacccctgggtcaggaatgaggatgtcttctctttcaagataaactgaacaagtcacctttctgtcacttgttgctgctgttgttttgtcccttttggacttgataaagttttagagcttaaattagagtcatttcatgaactagtgaccaagttctaccagttcatttgtttaaaatactttatttaaaaagaggtgcttataccccttaatgcattaatctattgactgaatagcataggataatttaccaataccatatgccaatttgtcttagtttgtttttaagacacttggttattgggcctatctagcacctataatcacagtggaagtgaaataccttttttatatttttggttagtcttccctgacatgtgtatggaattatatgaataagactaaatattcttaacattttgatagtttgtaaaattgatttaaggcagtgttcttctaaagtacacttgaagaaaacaacagtccaaactaatagtgtttctctataatagtgagcttgactatctccagatctctgcttttcttcttgtgtgatataaacttgcatatttccagtgttccctcataccaagcccattagataagagacttcaagctataaaaccaggagtgaggggggagggcatagctcagttggtaactctgtcagcctctaccttcgcctctgccactccacctctctatgcctctgcttctgctcttctccacccatgtctctctgccccgtctctctgttccctctggctccccctctgcccctctctctctgacccctctgcctctctctctgccccactctgcctaacctccctgcccgcctgggcctctgggccccctcccctacctcctgggtactgagattaaagtcatgtaccaccacatctggctgttgactacattttatagataaaaagcctgaagtttaaagtttaaagagttttcaggcataaagatagatgttaaggaagaaaatagggatatttcataatgaacttttaagttgccttaacagagatgatagatttgtcagtgggggaagatgccattcagaactgttacagatatgacttgtttgagaacatgatcactggagaaatctcaggattcctgagagggagtctaaaagagaaactgagttaatgagaggtctgttttatggagatgctctgtcaacaagattgatatgtaggcctgagtgagtctaggagcagcagaactatgtaggtatctgtttggaaagtttagatgaagaagaccagaataacggtgggaatcaaagacagagtgggggatcttaggtaccatggctatttgaggtgagtcattaagtagatgggagagtaatataatagtgattcatttttaatgttgttgatgattactttaatgtgtttgtagaatgcctaggtagagatgtctattatctgaaaatgtaggaccatgtagattttctgaaagattttattctgtttacaggtatttatagtttctgtttttggcaaagaaacaagtctttaatatatttgtttatattttcctctgtattttatagtcaattaaatgaaaaacccttaccagaaggctgggaaatgagatttacagtagatggaattccatattttgtggaccacaataaaagaacaaccacttacatagatccacgtacaggaaaatctgccctgtaagttttctaaacattactagttaaaagcacaactaagttcttggattttgacaaagatttcagtaagcaaagattggaggtgtgcttgagatgacttgtccataggtctctgaatactgaatcttgttggttttatttgtttatttgggtgtggggcatggtggggaacaggttctctccttaaagctctggctgacctagaattcactctgtagactaggctggccttgaacttacagaaatcatctgcctttgcttctactagtattaaagaggagtaccactatgttcagcttaagagttctttatatactggcaggagtcacttgatacattatgagaaaggcaccattgggtgagcattgaagactatgctttcacaagcgtagatggattaagcctgctatatgcctagactatatgtcatgtattacttagcctaggtatgatctagtattcctaaaatcgtgatggcccaaacacaagattaaataaagcactggaagaaaatgatgcaatcaagatacacagtaagcacaaagtgtgtgatgtttagcctgtataatatggctgcttcatagtaaactttgttgttgttgttttgtttttttttgatcatttgagacagtctgactatgtaaatctggcagtgtagaccgggttggccttcaatttacagaggtatctgcctctgctgcataagtgctggaattaaaaagtgttccttatcgtacttggctgaactttttatgttagtagaagtatactctaaaataatgattaaaaatggagcactaagggctggagagatgactcaatggtttagagcactggctgctcttccagaggtcctgagttcgattccagcaaccacatggtggctcacaaccatctataatgagatcttgtgccctattctggtgtgcagacagaacactgtatacataataaaaattctttaaaaaaaagggggggggcggcactaagccggatgtagtggtgcatgcttttaataccagcactagggaggcaaaggcaagtggatggatctgtgagtttaaggccagcctggtctacatagtgagttccaggacagacaggactgttatacagagaaaccctgtctcaagaaaccgatatatatatcagtgggtgtgtgagagatgacacacaatgcctcagtgggtaaaggcacatattgccaagccaaaggacctgagtttgatatccgtgatccacatggttgaaggagataactgacttccacaagttgtcctctgacactggagcactatggtatgagcatgactatacacacaaaataaataaataaataaataaataaataaataaataaatataataaacatgttaaagagagggagagctgggactatagttcagttggtaaataagtaagtagattgaattgttttttctttttcattttattggaagaagattgagtacacttccagtgactaaatagtaacaaagggattagaggtattgctcagttagaataatgcatgcctgcatgcatgaagcccttagttcagtctccagtatcacatgcatccaggcatggtggcacatgcctataataccagcatttgggagatggagatggaccaaatattaaggccagcctgggctacataagaccttgtctcaaaacaaaagtacaaaaagattccactcagtaacaagagtactgccctgcagccagttatgtggttttcttcatttcttcttcagattcattgttaatgtgtagacatataactaataatgtgttaacatattctgatactttgttgaatttctttcttaaggtaattttcaatttctgcatataagattttattatctgaaaacaaatcattatgtattcccagtctgcctcctttttcttgcctagttattctagctttaattcccaatactagacatccttgcattgtttctgacctgatcttagagaggttttcataccttaactattggttgtaatattcttgttagatttttctcctttcttttaactaaaaaatatttttcactttgtgtggtattgcacacctttaatcccagcacttgggaggcagaggcagacatatctttgtgagttcaaggccagcttggttcacatagccagttcaaggacagctaagactacatagaaagatcctgtctcaaaaaaacctctgtgtgtgtgtgtgtgtgtgtgtgtgtgtgtgtgtgtgtgtgtgtgtgtgtgtgtgtgtgtgtgtgtgtgtgtgtgtgtgtgcccgcgcgcgtgtgcacgcatgcacaagagagacagagacagagaccatggagctggaattacagacatttgtaaaccacctaaccagtgtgttaggatctgagctctggtcctctgatagcacaggaacttcttaaccactgagtcatctctggccctttttgttatgtttacacttgattgttacatgatttcatatgttgaactacccttccattctaacaaattccatgcggtatgtgatataaaggattaaaacatcaatcctttaatattctgtcaaaatccttttgcatatatatatgtatatatatatatgtgtgtgtatatatatttatttattttggtttttcaagacagggtttctctgtgtaacagctctggctgtcctggaactagctctgtagaccaggctggcttcgaactcacagagatctgcctgcctctgcctcttaagtgctgggattaaaggtgtgcaccaacaccatgtggcagctaataatatttgactgagaattttatatttctgcatattaaaagcttgcctgtttacacagaaactgagaaatcagtccaattaggcaccaatgaaaaattatagaggtaatcgagctgtgccaataaattataagtagataatatagttacaattaagtttgggtgcatataacagaaagtcctacaacaataataccttatatttgaatagtagtatatttttctacattatttaaaaataacctggaccagataatgatgttttcctgtaatcataaccacctgtaactcaagctctgtgagattcagtgccctcttctggcctcctctggcacatactccctcccctagataattaaatttaattaaaaataaaagtgtaactcaccataaaaatagaatagcagaggaaaatgtatgaccattatgtctcagtagttaagagcacttgttgcacttggagagaattctagttcagtttctgtcatccacatggcatggaacaataatctgtaaattcagttccagggtatccagttccttctcagccctcgttgggcattgggcactcacatggtacacagtcacacatacaggccaacactcttacatcttttaaaataagtcatgatcattttatgatccactttcacctgccgtggaaatgttcttacctacgaaattacagacaaaagcctcagtcagcatcatatttaatgatgaagtaattcctccacaagaacaagggtatctatcagcattactgccactcatcatcataccggcaatcaagtgtagaagagacagtctgagccagcgttggctgcgcatacctttaatcccagcactcgggaggcagaggcaggcggatctctgtgagttcgaggccagcctggcctacagagtgagtgccaggataggctccaaagctacatagagaaaccctgtctcaaaaaacccagaaagagagagagagagagagagagagagagagagagagagagagagagagagagagagaaaaaaaaaataaacagtcagtcagtctggagaggaggaagtcatactgtttttaagaatcatatgtagtgaaagtaaaagggaatatagagaaaaccactagagctagtaaattttccaagattgcagggtacagaatcagatggaattcctcattgaaacaccagacagaggcttccggtgatctggagttcttgttctacagccctagagcagggtttccatcctcattgtgcttgtcatttggagaaaggccacactggaatgggaaacagcaaaaccctgaaccaatgtctcttctcttttaaaaattgacttgttgaaagcccctacagcagttgtcattagaggtccttagacagacccgaagtctcacacacacactaggtagcatccacttggttgaccgtgagtctcagttaaggataaaaggatagagtagtaaatgtgatgggttacatttttatgtaggagctcttttatccagccctgttatattcacctacatatagaaaaaactcccctagcagtagcgtcaacaagattttagtaaaaatagtcctgaggaaacattcaaaacagaaaagagttgtattaggaatatgctctgcctggttcctttgtatttgtctgctgagtaatgggtcaaaacaggggtggggagtggctgtgtttgctttcctgcagcatttcttttacaagcagttgcatgtgtcatgttaatctctgtttttccagagacaatggacctcagatagcctatgtgcgggacttcaaggcaaaggttcagtatttccggttctggtgtcaggttagtgttggctctgtgtctctaaatctctttgtttgtttgtttgtttgtttgtttgtttttctagacagggtttctctgtgtagctttggagcttatcctggcactcactctgtaggccaggctggcctcgaactcacagagatccgtctgcctctgcctcccgagtgctgggattaaaggtgtgcgccaccaacgcccagctctctttcctcattttacattgcttatgttataccgcggttctgcaaatatgtatttacaagaaaaatgtgaagcattggactcatccatttttaggacaatgaaatatagttttcaattagataattgtatgctttggacacaaagattgagctagaaatcatttgaattgagaacatttgactttttttcatcagtactattgttttcaagttgcataaatctagcaacaaaatattttctgataaacagattgcaattggccccttatctagggtgtgtgtgtgtgtgtgtgtgtgtgtgtgtgtgtgtgtgtgtgtttgagacaggacaatctaaatagcccatagtggctttgaacttaaaatcctcctccctcagccttctgagtgctgcaattataggtgtttgcctcagccataactccatgtagaatgtttgaaatgtctttgataagtacacatgtgatcatttacatacaaatatatattcagtgtttttttctgatgtctaaagattttctgtatgggttctaaataaaatgagtgcattaattgaactattatgttaaatacttaaattcaaatttttataattaactgggaaacataattctggattaaaaattgaaaattaaagacttacttgagtccttaaataaatactttatatatctgattttcatactttacatacagagatctgattttctttttactctcattgaaaagaatcaatgtgagtgctgacagatgtgttggcaatcatggtatacattcatattcaaaatctgtttttatttgcaaagttaaaagtaagtaaaaatttccttttgggtttagctaggccattttaatggtgagagttgatttaaattgttcttacataagggagaggggagggaaggggaactggggaagttggcatgtaaaattttttttcaaataaaaaaatatttttaaattgttcttacatttcagcaactggccatgccacagcatataaagatcacagtgacaagaaaaacattgtttgaggattcctttcaacaggtattgtctcgttcactcagtaatgactaccttctgatattgatgatttgctcttaatagtttagcttataactttagtgtttgtgtgtgtgtgtgtgatatgcatgctcatgttcatgcaagtacaagtgtggaggccagagacgtacgtcggtgtctcactccctcactatctaccttgtattttgagacggcacctcactgaacgtggagctgacatttgggctagagcagctagccagcaaacccttaggatctgtctgtctttgcccttctggtgctggggttacaggcactgtcacaacaaacttctacatgggttgctggagatttgaccacgggtcctcaagcttgcacaggaagcactttactctcaagccatctccccagtccctattcttgatttttcagttcaattttgttgccagctatcttagtacattgcagttgggagtgtgcaaatgctcttgtgcagggttttctgcttctcagtgtaaatgatgactgagtttcaagttctgtgtctaagctgctaagggtgtgatctgaaatgatacacagtaaaattacaatccgtcactagaaagaggtctggaaatagccatgtgcacatgtgatgagtagggagaagagtgaagagtttgtttttacactttgtattactttggatttttttttgataaacatttgtttctcttagaagtaatatattttaagtaggaaagaaattagccattggtttctaagttttcattttcatcagtgaatgagtcagttcactatctttatactgcatacatcactatcaagccaagtgcaattaagtgttagattgtcttagaataaagaaatggaattttttaaacagcatcttgctggtctttgtcttactactagatgtggaaaggatggttttccagcacctgcagtacattgtgataggtgggttcctgagcactgaactaagctgaaaggaagaaaggttcaatccattggccttacctggctgcttcatttcaggaagagttttgttccttttttaatggaaccttagttattaaagagacaagtcagttgtcatcctgctatataggaattaactgaggtacttagagaattctgtgtatactcatggcctgatgtatgtaagcctccatggccatcctcagcctagcgcttactcattcctagtcctcatactcatgattgttttttttttttgtcacttttttatttttttcaattacaactccctagtagctgtagtaacaagatgcagaccatgcttaagcaagccttttatctttatgctcttacaactaaagacttttgcagtgacttgatgatgtgctagaacatttaaaactcatgttagatttgacatccaacaaataaatgggcacttgtaagagaaaatatggttgcttaaaggtaataaatctgatatcaaaataagatgtaatttaaaagttagcaacaggctttcttcatagatgttggataaaattgtgttaaatggtgttttttataagcatagtacaactgtttatggtggaatgtgtagaagaaaaaaagtcccttcccattagcacttgttaaagggaattgttcaaactagttgtaaccttgtgacatctctcaagtttgtagccaagtgcctagttcatggcacatgtagggtgtttatcataaccatgcagtcacaaccactgaactttttgttagaactggctgtactattttgagtgtccgtgtctctttcgtagggaactgagagaacttaccaatcctctttggatatttattaacagtttattcttatcatgtgataaagtatagatatcatatcaaactatcccttgcaggcccctatgggattctcctaagcagaattaaataattttagcgaaggagaaacagattgacctatctactgtagctttgtaatgctgctgcccttgacatctaaaaatgacactgttatccacccactgtgggaggcaaaggagtagttttctgtataattatatactccctctgtgtctgtttccaaagataagtaagtctgcagccactgttaattagtatatgtatcttttgactgtgaaacaaaatcaaagctaaccagtcctactgctcttccctatgttactggaattgaaggaaaatacccaatccatgcctagagttactttgtacactacacaattgatagaacaacttataagtttcatgtagaagtgtaataacgtgtataaaaaatagatgcttatcctaagtatatgaaacattaccataatgtatttctatatatgtgtactatgaattagattgtaaacattctgtttcatgtggaatttaagttacctataatggagtaagtggaaagtgacagtgatgtttccacagttgcagttacagttctctcactttgttttgtagataatgagcttcagcccgcaagatctgagaagacgtttgtgggtgattttcccaggagaagaaggtttagattatggaggtgtagcaaggtagtgatatatgaatactcagaacttagtcctttcttccaaaggtatcattacactttgttcacagtgttattttctcaatctaatatttcaggaaaatgacatatagaaaaccattgtagctttattatgctgcaactacagaatttcaacaaacattaacttagtgcctattttctaagaactgctggttgatggcacctacatcattcacattgtcctcagagtaactctatgggatacgattttacagatgatgagatttagagacttatctagggcacataagttgtagccagatgtaagttttcattttctcaaacagtgtcagtcaaccaacttctgtctgttccatgtattacctagagccctgaagtgtcaagtccttctcactagaatactgagaaagttgatagcgactcagttcctacctaggattgacttagtgctgagaacatagaggactatgagaaaattgctgaatgtctttgttctgctctattcattttggagcaactattcagactctagaagacatccttgagcaagagatagctttgcttatcccatgacagtattacaccagtttaaaattttaaactaggactaggcagaagtggtgcacatctttaatcccaggcctggggagacagaggcaggtgggcatctgtgagttccaggccagcctggcctacagagcaagttcctagacagactccaaagctacaaagaaaccctgtctcaaaaaccaaaaaaataaaaaattattaactagggccacatgatggctcattggataaaagtgctttctacacaacctggcaacttgagtgtagttaccaaaacctacagaaggagagaaaccagttcctcaaaactcttgtgtaacctccacatgcacaatatggcctttgtgtactatgacctgcacatacatacatacatacatacatacatacatacatacacacacacnnnnnnnnnnnnnnnnnnnnnnnnnnnnnnnnnnnnnnnnnnnnnnnnnnnnnnnnnnnnnnnnnnnnnnnnnnnnnnnnnnnnnnnnnnnnnnnnnnnnnnnnnnnnnnnnnnnnnnnnnnnnnnnnnnnnnnnnnnnnnnnnnnnnnnnnnnnnnnnnnnnnnnnnnnnnnnnnnnnnnnnnnnnnnnnnnnnnnnnnnnnnnnnnnnnnnnnnnnnnnnnnnnnacacactcacatgcagcacacatatgatgataataaacaatagaagaaaaacatatttaaaactaagtaggtaataaaattttaagcacatgactaatcccagcactttggaggtagaagtagggaggatctagagttcaagtttagcctggggtacacgagactcgttctcacctaaaatcaaataaaaataaattacaaagcagtagcagtgtggaagggcaagaattttaaggaaagacagcttgaatatttttattattttgagcaaatacctgtttctagattattatgaagggtagaaatattttgggtttttgttttgtttttaaaattctttagatttatttatattttttatgtacttgagtttttgcctatgtgtatgtatttgcctggtgcccttagaggtcagaagaaggggttgctttcctggaagtggagttagagacagttgtgagccaccatgtgggtgctgggaaccaaacccaactcctccgaaagagcagccagtatagatagatagccttggctgtcttgaactcacagatatcctcctgtctctgcctgatccttctgaatgctgggattaaaggcatgtgacaccatgcctgactgaaaatactgtcttcaagattttttttttaaatatgaatctttgtatatgctaactggtgagtacatcttactagtcactttttttttaaagatttattcgtaattatttgtgtatgtgtgtgtgggatggctacttacacatatgaccgaagtgcttgaggaatccagaagacagcattagatcccttggacgaaagttacagccagctatgagctgcctgacatggtcctgggagctgaactctagtcctctggaagagcagctggtgttcttaaccactgaaccatctctccagccagagtaattttttatagcttaataaattctaaaatgcagttaaactatttaaaaatacatgaagtaatctgaagtaataaatgtaaacaagtaataaataaaataagtgtctgcagacagacacttagatcatttaggagacagccaaatcactcataatcagaagaatgcccagcagtatttatatttgccacattctcaccaaaggttgtgcgctaacaggacaagaggtctaggatacatgctgatggcgcaatatattgggccagatagacccatccgtgttacatagtggccataacttggtgttttcaagtcacttagattagagcttcagggtggctgtgagatgattgttgcacaaacctgtcgaccagagttcagtccccagaacccacataaatgtagaaggagaaccaactttgactcctgaatttatgtgcctgtccctcctctctctctccttccctctctgtcacagcaagaataaacttctcagggcattattctaatagatgagtggctggaataagtgttttccctatgaaaatgaggtgtttggcatagtggctctccttaagtattctatgagacttaattgaagatggaatcagaattgtaattcagctgctctaattacctgggccaatagtaaattttaaacttgactatataaaattttatcaactaacaattttcacattttaatatctttgaagttagggtgcatattatgattgtgattagaaaaactttagtgggcaatcaagtaagggtctttaaagttaatgatatcttagatcctttgaaatttgagagcatataaatatcctgtgtaacataatgtagtttgaacagaatcaagaaaaatcaacaagaaattagaaaagcattgcagttgaggcaggcagattcctgacaactctataatgctgctctgttatttgttgacttggtttcctacaagacttttcatcctgagttttcttttgatttcagagaatggttctttcttttgtcacatgaagtgttgaacccaatgtattgcctgtttgaatatgcagggaaggataactactgtctgcagataaaccccgcttcttacatcaatccagaccacctgaaatatttccgctttattggcagatttattgccatggtaagtacaggtgtaacactgcacttactcattcagcaatactaaatttttgtgtattacaacagattatgtgacagagtccccctccccccttttttttaatattttttgtttttgtttttgagatggggtttctctgtgtagccctggctgtcctggaactcacaatgtagaccagactggcctcaaattcatagagatccacctacttctgcctcctcagtgctgtgatcaaaggcatgtgccactaccacccgtcacgacagaatttaaaatttttattttgtctgtctgggtgttttgccttcgtgtatgtctgagcaccatgtgaatgcctggtgcctgtggaggtcaggagagggaatgagatcctctggtacctgagttacagacagtagtgagtcaccatgtggttgctgggaattaaacctggttgtctggaagagcagccagtgctcttaactgctgagccatctttctacctatagaggttttagagaagtgaggtcttcatcgtgtgtgtgtgtgtgtgtgtgtgtgtgtgtgtgtgtgtgttgtgtgtgtgtgtgcgcgtgcgtgtgcgcgcgcgtgtgcgtgtgcgtgtgcatgagcacacatatgtatttgcttgtttgttttgtttttgagggaccacctccatacatagctttggctggcttgactatcactgtgtaggccaggttggtctccagttcctggagatctgcctacctatgtcttggagtgctattaaagacatgtgccaccacacccagcctcaacaattttttgaatggaacacttatctaatgttttgatgtttaatgacttttatatggttatcttatacagtattgcttccttcctgtataggctctattccatggaaaatttatagataccgggttttctttaccattctataagcgtatcttgaacaaaccagttggacttaaggatttggaatctattgatccagaattttacaattctctcatctgggttaagtaagtttctttttacatttattaaaatacaatccatgtgctttcattgtggtactagtgaagttttccacattataaccatgtcattgttttatcgaatttaaatgatatggacatcaaacctttctcatgttcagtatgataaattttatagaagtgtaccctaggtcttaggtaatatgattctaatattctatttctttgaatttgttgtcataatttaagggttattacttaaattcagaaggtgaatttaattaaacttttgaattatgattgatatgtacatataaaaaataatgcctatttcaattgtgcagagaaaacaatattgaagaatgtggtttggaaatgtacttctctgttgataaagaaattctgggtgaaattaagagtcatgatttgaaacccaatggtggcaatattcttgtgacagaagaaaataaggaggaatacatcaggtaagagcagtgtccctaaaaggaggcaagaagagtggtgcaaacggggatggctcaacagtgaacagtacttgcttctcttccagaggaccctaagtttgttcacagcactgacatcagacggctcacaaccatctggaactctagctccaggggatcaacacttctgtcctctggacactaacacacatggcatacacaacatacacacaaaaataaatattctttttttttttttttttttttttttaaaaaatgaggcaacgttcctttgacagagtttagcctttttgttaatgattgttaaataatagttaaaaggtgatagtcaagcaaagctcactaggcctgtgtgtgtgcttgcgtgtgtgcttgcgtgtgtgtgtgtgtgtgtgtgtgtgtgtgtgtgtgtgttggggggagcctcataatagatcagtagattaaaaaacaaacgtgagcctttaacgtgccaatcaaccaccttgaccaaattgcttttttcctcttgtttttctacttgatacttttgggtcagagaacattctttaagatgacattctgttttgaaacttgtgttataagccagtatgtggtctgtcttttgcacatatgtgcttctatttctgggttagttattgtcaagaactcaaatacctaaaatatacacctttgtttgcttgttaaaattgttttaaaagaaaatattctgaaacaaaataaaatttttatatgattttaactgttgaaagatgtagataagaattgaaatctggggccgggagttggtggtgcacacctttaatcccagcactcaggaggcagaggcaggcagatctccgtgagtttgaggccagcctggtctccagagccagtgccaggataggctccaaagctacagagagaaaccctgtctcgaaaccaccccccccccaaaaaaaagattgaaatctgcaaaattttttggtaaaaagagtttaaagaaaataattccctcaaaaaaaaaaaattttttttcgccgggctttggtggcgcacgcctttaatcccagtactcgagaggcagaggcaggcggatctctgtgagttcgagaccagcctggtctacaagagctagttccaggacatcctccaaagccacagagaaaccctgtctcgaaaaaacaaaacaaacaaacaaaaaaaatattttcaaacatggcatggtgatgcttacttgttatcatagccattgggaagctgaggcaggaggattgccttgggcttgaagccaggctgggctatatgatgagttacagggcagcctaggttacattgtgagaccctctttcaaaaaaaaaagacgttcatgctactctaatttttatgtctatttcagggttttagaataatgtttacaattttaattttatatgtagaacttaaaatcttaacttcctaatacaatttccattcttacttgccaggatggtagctgagtggagattgtctcgaggtgttgaagaacagacacaagctttctttgagggctttaatgaaattcttccccagcaatatttacaatattttgatgcaaaggagttagaggtaatgagcctttcttttcctccaacacgctagtgaatgcccttgggtatctattttaaaaccagtgttttcatctttctagtggaatttgtgtttttttacgataacaggtgtttgaaacgcccttaatttatactgaaagaaagaagaacattacctgagaaaaaactgttgttgcagctagagaggtgacaaagggttatgtgccccgcctgctcttcagaggacctgagttcagttcccagatcccagggtaccaggctgtctagaagtgcacaaacacacatatagacaaacatccatacacgtaaaataaatcaataatatttttaaaaagtcttaacattaggtttttctgcaattcagtaactatttctctcaatatgagaccccacacatgggagctgtcctccctgggtcgtgactaggactctgagtcacatggataggacatgggggtttgggtttactgagacttgcttagtgtatcttcagtcactgtttcatggcagtcttatttaggagaaacaattttggttacctaaagtaacaacttgctttttgtttttgttttattcatataggtccttttgtgtggaatgcaggagattgatttgaatgactggcagagacatgccatctatcgtcactacactaggacaagcaaacagatcatgtggttttggcaggtttgtttctaaatttatttttatagacagacacagtatacatttgttttattttttttttagaatttaccaaaataagtgacataacaaaatgtaaatttttgtcctaaactgtgcattacagtaatatgttataatgagtgagtgtgatttttacagaatcctctaaagactgttactgagtaacacgtaccttgtacttttgccagagtacaagctaatttcagaagatatgattcattcatttaggggctagagagagttccattggtaaagagcacttgttcttgcagtggttcccagcactcatacgatgactcacaaccatccatagccgtgtgttctgcacatacatatgcatgcatgcatgcatacatacatacatacatacatacatacatacatacatacatgtgctgcacatacaatcagtaagtctaaaaaacttgtaaaaagaaagggtcatttatatttgacatcaatacttctggaatcttatggaactataaagtatggctttgatcattgctacttcattaagaattatataatgtttggaaggcagatttagatctggcttagggttgtaggagacctctcaagaaatgcctgctgttgccgggcgttggtggcgcacacctttaatcccagcacttgggaggcagaggcaggtggatctctgtgagttcgagaccagtctggtctacaagagctagttctgggacagcctccaaagccacagagaaaccctgtctcgaaaaaccaaaaaaaaaaaaaaaaaaagaaatgcctgctgtcaggctgttcagccaataaagtgctcactgtggaagcactggtacctgattctgaacacccacttgggaaagcagagccagagacatgctcctaacctcagtgctggggaacacagatagaagaccctggggactcagtggccactccagccagtaagtgagctctgggttcagtgagagaccatgactggaggaaaaaaaataaaaagctggagaatgatagaggaaaattcctaacattggcctctgacctcaacacgtactcaaaaatgcatgcacacaccagtctacacaggtgtgcaacatgtgccatcaccactaccagccaactaaaagcataagattgagggcccaaaataaaaaaagaaagtaagaaagaaaagaaataatgaggaaaaaagaaagaagaaaaaagattgagggccaaagagttggcttagcctataaaggcgcctgctgccaactctgctgacctgtgtttgaaccctcagtttcaggaaagaaccaccttctgaaagttgtcctctgtcctccacatgcactggggctctcttgtgcacacactcagtgaataaaaatcttaaaatagccgggtgttggtggcgcacgcctttaatcccagcacttgggaggcagaggcagacggatctctgagtttgaggccagcctggtctccagagcaagtgccaggataggctccaaagcaatacagagaaaccctgtgtcaaaaaacaaaaataaaaaacaaaaaatcttaaaataaaatggggctggagcgagagcctagcaatttagaatacttgttgctcttgcaaaggaccctggtttggtcttcaatgtccacattgtgctcacaaacatctgagcttccaatttcagggaatctgatgttctcttggacatccttcttggacactgtacacatgtggtttgcatacatgaactcaggcaaagacacacataaaatgttactttttttcattttttttatttaaagggaactgacaagatggctcagtgggccaaggcacttgccaacaaggatgaatccctaggactcacttggtagaatgagagaacaaactgtggaatttgtcctctgactttcatatgcattggtatctacctgttcacacacagccacacaaaaacaagtaattagaaaaataaacagggcccagcactcaggaggcagaggcaggtggatctctgtgagttcgagaccagcctggtctacaagagctagttccaggacagcctccaaagccacagagaaaccctgtctcgaaaaaccaataaataataataataataataataataataaaaaatagggtctggggatatggctcagtggttaagaacaacacttggtgctgttctagaggacctaagtttggttcatagaacccgtcagtgactcaaacgttccagggtatttaatgcctctgacctccacaagcacgtgtattcacatgtgcctacctacaggtagacacacttgcctatacatcattaaatataaatggtcctaaaaataaataaaaacaagtcactgatgctcaaaaatctttaattcttaaggatatacaaattcaaaccccgctagataggagtttgtacacattaggaaataggagaggcataccctttgatgagcatgtggaaaacgtgaaaccttcatttctgttaagagtgtaatgtactgaaatgggagatagtgtggcagctcaccaaaaagttaactgtagccaggctcggtaaccatatccctgtaatatcacttgggaggcaagaagattgatcaggagttgaagaccagcctcagctatatgagaccttgtcttaaaaacaagaggccagcatggtggcgcacacctttattcccagtgctcaggaggcagaggcaggtagatttctgagttcaaggccagcctggtttacagaatgagttccaggacagccagagctacacaaatcttgtattgaaaccccccttgcccctccaattaaaacaaataaccaaaacatggacagtttaaatatacagttaacatacatgatttaccagttttacttcaaaagaattaaacctgaagacccaagcagatattgctgcatgccagtatttataggagtgttgttccagcttacctaaaggcaaaattaacctacctgcattttaatggatgagcaaacaagaaatgatgagtacattaatggaaatcacttagcccttaaagtgaataaaacaaaaaaaatttttttaaatgaatataacttgtgagtatatgaattttgaactgggcatggtatctcatgcttgtaattataggtctaagcccagtggctctcaaccttcctaactctgtgaccctttaatacagttcttcatgttgtggtgactctataaaattattttcattgctacttcataactaattttgctactgttatgaattgtaatataaatatttttagagatgaagggttgccaaggggttgtggctcatagatttgagagccattgtcttagaggctaaggcagagggattatgagttcaagagaagcctaggttacttagcaacgtgtctcagaagtaggaaaaacatgaattttgtgctggaagtatcacttagttaacatgctccaggccccaaattccatcataagcactgaggctgggggaggggtgttcagaggataatcagggctcagatgcagagcacttcccctgtctacacaggccctggctcagccccctgcactgagggaaaaaagcaagttttgaggcctggcttggtggcacacatctctaatctcagtcctcaggaagttggaggaccattgtaagttcaaggccagcctagtctacatgatgagccctgagctgtcatccttctaccttccaccacccaggtgcataggcatgtgttggtttttaaataattgaaaagttatatgcaaaaagcacttctttaggtgtagaaattgattgaggcggaatatgggattgaggtaacaggctctgagagttttgtttaggatgatgaaaaaattctcaagatagttaatagtatggatgtacctaatgctgctgtattgtacacttagaattagtaacatggggagctaggaatagggctgagtctataatgtgcttgtaatcaaagtgtgcatgtgaatccacagcacactcgggaagctggacacagcagcacacagcttgatgccagagctgggaggcagagacgggagcatccctgaggtgtcctagccatctagtatagctgagaggacaagctgcagggtccacgagagactgtttcaaaagacacagaagatagatggagagacattgaggaagacatgtaggattgacccccagcctccacacacaggcatttgcatctgaacatacatgtgcacactcatgtgactattacatttgccacacaaagtaacagggcagactctgttaggggtatcttacctcactcttacgtgtgtgtgtgtgtgtgtgtgtgtgtgtgtgtgtgtgtgtgtgtataaatgcacatattgtgtacagagatggcatggtttgcatatggatgcagagaacaacttgtaggcatcaggtctttcccttctatcaagtggcttctgaggattgaacttgagcatcaggcttggtgacaagcaccttgtccactgagccatctcactggtcatttaacacgattttaaaaataaaacttaaaatgtcctctatacatgtaacacaatttgtgttaagaaacacaaagatgagaccagcctggtctacaagagttagttccaggacagcctccaaagccagagaaaccctgtctcgaaaaaccaaaaaaagaaagaaaaagaaagaaagaaagaaagaaagaaagaaagaaagaaagaaagaaagaaagaaagagaaagaaagacagacacaaagatgaagctgggcatggtggcacacacttttttttttaaagattttatttatttattatgtatacaacattctgcttccatgtatatctgcacaccagaagagggcaccagatctcataacagatggttataagccaccatgtggttgctgggaattaaactcaggacctctggaagagcagtcagcgctcttaacctctgagccatctctccaaccccgttggcacacacctttaatcctagcatttgggagtgagaggcaggccgatctctgtgagttcaagggcagcctggtctacagagtgagttccaggatagccaaggctacacaaagagaaaccatatcctgagttgtccccctcatctccccaaaaaagaaagaaactcaaagatgaactgaaataattgacaaccagattggtggctcatgcctataatcctagcacctaggaggctaaaacaggatgattttggagtgtaaggatattctcaagtatatagcaagcttgagatcagtctggactataggctggccctgaacgcacagaaatccacctgcctttgccttcctagtgctgggattaaaggtgtgtgccaccacagcctggctcataagaccccccccctttttttttttttaaaaatgactaaataattgacagtaaataagggaacatatgcattataaaaacatgtgttgctcagccaaaataagctagaggatataaacatttgctagaaaccttatatttctggctgcatgtggctacaaataccttaagatattgaggaaagtggttgttgcatttcataagcttaatttgatttgtccttgaaaccaagagatttattcatactagacctttgtgtcctgagtaaccacaggaacgtgctataggacagtcaagtctaagggggaacaggaaaggctgccctagaaaaacagagccaagagccttcagagatcctatcctgaggtctagtaaaggaggctgctgaggctttgatgggcatggataaatttattatctggtgttgctgacaccccaagttcatttaagatttgaagtgatcatttctctttcttgttcagtgagctgtatataccatgacttaacatttctccttgaatgtaatgttaacagtttgttaaagaaattgataacgagaagaggatgagacttctgcagttcgttactggaacctgccgattgccagtgggaggatttgctgacctcatgggtgtgtataaaggtccttttctgtagagaaggctgttgactttcctgcctttggatgattgtatgtgcaacttaccaggagcaacaaacaggtccacagttgacctgcattttgtggacttggagttgactttagttcttacctcagtgtatttttttcctgttttgtaagacagggtctcacgtcccctagtctggcttcaaactcactatgtagccaaggataaccttgaattcctggcctcctgcctccatatgtatatttggtaaagcgctatggtagaagatatatttgaataaacaaatacctgttcctgtttttgggtggggggaggactacctctttttcttttaacttttattttatttttattttttttagtacattagtgttttgcctgtgtgaagatgtcagatcccctgaaacaggagttacagacagttgtgagctgccctgtgggtactgggaattgaaccctggtcctttggaagaacagccagtgctcttaaccactgagccatctcttcagccccacttatgcctatttttacgaatatatttgagtttaagaaagtaaattctctctaagcactggaaaaatcataaagcatataggaaacagagacatagctgggcttggtggcgcatgccttttatctcagcactcgggaagcagaggtgggcggatgtctgtgagttcaaggccagcctggtctccagagcaagtgccaggataggcttcaaagctacacagaaaccctgtctcgaaaaaccaaaaaaaagaaaaacaaaacaaacaaaaaaagccacttgaaatttattaggagggaagaatctgtgagaatgactgcctctgccagggtggaaaaagggcatccccaaactaaacaggcacagggcttatgtagtgtttcttaggggtggagctttccaaggtggagattttcagagtgaggattggtagatctttttgtgctgagggattggttgaatttcagtccctgagttggttgggacagggtgtgtttccttggctctggtctcagggccaggtgttctttcagtggccctttttaccctatgcatgtggcaggtggcttctgctgtatttcacaatcttctctgttacatgttaattcacatcactgactgcttatctctgtagctcaaatactttaatgaacctttagtcccagcgctcgggaggcagaggcaggtgggtctcttcgagttccaggacaaccagggctacagaaagactgattaaaaagcaaaaaaggggggtgggtggggggagcagtattctgaaatgaatagaagggagcatgcaaagtgaataaatgtctctttagtatagaactccaccccccatccccccacccccgccagggtttctctctgtattgttgtggagcctatcctggaacttcctctggagaccaggctggcctcgaactcacagagatccacctgcctctgcctcccgaatgctgggattaaaggtgagcaccaccaacgcccggcagtatagaacatttttaacagctcttgttcataaccatctttgtttccttatcctcctggattctgtgtgtaactacttgtgagtgttcaaacacaaaagaactacctgtctccgttgttctgggtctagtcattaggatacaggagctctgtgcatggtgcaccatacactgggaacattcagtgttctgtcagttctagttcacaaggccaacaaacagcacccactagcagtcattttgaccaccagtgaatgcttcctagggagcaggcgtgtccttttaataaagccatgcttggtgctgattaacaccacagctgtgtctaacaggagggaggaggcaagcatcattgagggtgagtatgtgtctaaggtcggctgtccaggacctgtgagcaccggccttatgctgaatttgctggctgcttacatgtgtagagtttcaacaattaggtatctgtgtctatgtgggctattattaatcatggcattgtgctattctagctaaggaatgataaatagagctgcagggtttcttcttggtatttgtcaacaaaatgattctcaaatttcaccacttgtcagaagcacccggaagcttgttaaaatgtgcacctaagctcctgcccctggagttgtgatgcagtaggtttgggacaggtctgtgcatctggggttctgaatggcaatgctgctgctgaactcggatgcataatgaagaactttaaatcagcaatttctttatgcttttactgtgctttagggagtaatggaccacagaagttctgcatcgagaaagttgggaaagaaaattggttacccagaagccatacttggtaagcaaaatcagaaatacagaaaataaactttaacaacttagcctctggctacttgttagaaatgaattaatttttccatatcttaacagttttaactgaggcagaatttatgtcttacaaaataaattcccttccctccttttaaaagattgtttttatttgtatatgttgctgcatgaatgtatgtgcgccatgtgtaatttacaggtgttgtgagctacctgattcaggtgctgggaattgaaccctgggtcctctggaagaacaataagagctcataaccactaagccatctgatagctcatattccccccccccccttttattgagacaggacatagcccaagctacccttgaacacctgatcttcctgcctctgcttcccaaatgctgggattacaaaccagaaaactgacccattttgatccatgatatagttttacaggtttgaagttgttttagagccttgccttcaactcaagatgatctcttttgtgcccatttaccattcatgcacctttcctacctctcaaagtgttaacatgggatttagaatacttgtaccttacttagtaatttactgaacacaagtattgctctttttggtttcctttttgcaataccagcaattgagttcagccagggcctttcacattcaaggcagacctctataacagagctatatccccagaccttattttctggtttaaaatgcagtttaacctcattttccaaaatgtcccaaactaaaaagcaaccagtgttaacctcaaatacagttcatgttagaattcagtttgtggtaatcacatttggattttaacctttttcaggtgtgtgtagttcagtgttaagtgggttcatatagttatgtaggcatccctgtcatctgttggctgacatgtgtcactaaacacacacctacactctacagctcttggtgaccagcattctttttatctctaggacttttgattaattcaggtcctttctcagtatggaatctggcccttctttgcctggcttgttttacttcaaatgatgtgttagagtacatatcacctttttcttccttttattttactgattgtgtattttgtgtggcattaggaaacaaaaccaacaccttatatttttgttaggctaacattttgttgttgaaccacagccccagccttcctattacttttaattgacacaaaataattgtacatatttttatgtgacttagtttttgagacaaggtctcatgaagcctaggctagctttgaattcctattcatcctgcctctaatgcccaaatactgaaattatagacataaagtatcttgcttaactatttatggacctatttgctcttgcagaggacctgggttcgattcctagcacccacatgatggctcacaacaactataactccagatccaagagatctggttcacttttttggcttccactggcactaggcacatatgcaggtcatagatatacgggtaaacaaaacacacaggtaaaaaaaataatatatatttgacaataatgtaaatagttccttgggtttttaaaaggtggaattgtttattttatctcacacctataagaacacaaacaaacaaacaaaaagatactgcctaaaactcttaaagctgggctggagaaattccgagctaagagtagaacagagaaatgtagagggagcgaagtattagagggtcattttctgatatttctttgtgttgtttatgttgagacaaggtctcactatgcaaaccaggtggcctcagactcacagagatctgcctgcctctgcctcctgagtgctgggactaaaggcatgggccaccacacctggcctatcacttcttattctaacacgatacacctaaaaccttgtatagcctgcaaagtctaaagtatttctttttggccatttacagtaagtgtgataaccactgatctagagtggttgttagggcagcatgagcagactgtcatttcctgaatgctgaacattggcactgagctgtgtgcggctctgactatctaccacaggggtgggtgttgctatccagtttaccagagaaggcacttgagtgagtcttggaaaggttgaaagcagttcctcaaaggccctgattccagtccacattgtcagaactttaaagtgttgctgcagagcactgctcacatctgtctttgtatccttccttttcttaagccaacaattcttattttcagttttaaccgcctggaccttccaccctacaagagctatgagcaactgaaggaaaagctgttatttgccattgaagaaacagaaggatttggacaagagtaactgttgagaccttaggccaccagaggacagggactcatctacagtgcctgccccttccttctctgcctgttgcacatcttattgtaaacttggactgtgactagagagttatctgagtgtaagtagattaacgttatcactgagatttatcttccagtaattctggatttctactcagcgtcttcagaaagcagatctacaaacagtagtcagaaacttacttaacatgagatttaacacatgatgagatctcccttgtcttattctactagattgttcccttaacaacagttttctgtggtgtcaaagtcccacttgggagttggtctcttggtggctgttgtaaagattctgcagacacaagggacatctccaaagctgcaatacacaaggtcttcctggtaaagcctctagctaggaggcgctcgacaccagtgcaagctcagccccgcgccggcacttgagcaattgccgcttgtgctctccctctcatctcagcctggcctgactgttgttttcatccctggagcatgaatcagtgcgtcagtgcgtcattctgacgttattcctggcagtgacgcaggactcacatctttgtacaaagtagttttgtctatttgaattcagggaaacttggtccccgcccacacatgacttcatacctcttttcattcagtttataattattttattgccttgcaaatactaaactttacaagcagtatcagcactgtggttccttcacattttagaagttaacctaaaattaaaattattttttctgaattcatctaagatcattcttgatttttaagtcttacacataaattgaagctttatggttttatcataatctaataccccagttacatttctaaaccgttggaaccatttctaatccaaataaaggtcagtggtgcagtctttgaagtcaggaccatatcaacaaaatgacagtgcccagccacacctgtatgctgtctttacacttctgccacacacaggagcaggtgtcccatcttctcacatggtcctgatctgcaatatttttctcacccctaaaaacattagattttgctttttttcttcatgacttgtttatttcagactgctcctttagtaactgatgaatgcactttgactttctctgtactcagtttcccttggctttgcttagactgtcaggatggctgctgccatagatacgacttcatgagcagtgaaatgaagcctcagccatgtgagtccctattatagccaaatcccccaaaagccttataacacaaacagggacttttggacacatgtcggtagcatagcacgaacataaagcatgaagccaagaacacacagagagtgacaaacccctgttccataggaaagaaagtgtttctctgtccctagctgctcttcttgttctcaccctggaacattttgaatttgtgcagctgtactctaacactgccatcggtggtcagcggagactctcgtgactgaggaagggttgcctcatctagagaccatcagtgaagggaagctcagcttctcccagccctcttttcgtcctgtataccacaggaaatacatgtcatctctagaagccctagttatctccaaagtaggaactctctgcctttttgttggtagggttaaaatatatatatatatatatatgctattgctttgtctttcagagcgaatgtctgccaactacccatttactacataggcttggactttaatatatggctataaatactaagccttctacaaagacctcccattggatcaaattcttgtactaaaatgtagtcatctaccatatccactagagatttatgaaattaaattaagaaataatgtaagaaaataggctttgttgattctgcataatgcttcatgattcatttagggacctagagatattatgtgaaattgtataaatatcacccaaaaggctttctgccctatatttttaaaatacagaagttatatttgaagtagtcctggccctagttctatagggcttggctatttaatatttttatggaagaaatgtttagttctggaaaaggtaaatgcttgtatatatttttgcagccctggggtctcccaactccatttcttcctttaatttaattgatcacatgtatatgtcttccctgctgtgttaggaaaatggggctggatatcccaagaatcagagattatataaaataatgcaaccaaacagcagacataaatatttaccaaatgctctcacattttggttcagagtgagtatttggaaatagatttactgtgtttaattagtgattttccttaaatccagactaagttgcttttaagacctttttctctgtaagcattgtaaatgctaatcaatcctgttaagtttttttcttactgcatgttacattgaaataaaaacagagtacagtgagcatttgccttttcttttgctctttggtgggttccacagcagagtcaagagggaaggggcttgggtatttgatcagatgaagtgatttaaagccaactgagcagttggtagcagggacctctggtgtagaagcatttaaatttagaagttatttaaataactctttaaaattcaggtacttttgtcaccaaaggatccgatcatctgcctagaagctctcactctaaatgactgcctcagtcaagccctctgtcactctttacttacttggtgaaattacctgaaatgtttttggggtaactcatgtttggggtctaaattactttcactacttcagtggggtatcatgggtatttccagccgccaccccttctgggtggactttggactttcaagtgtctgtatgtgcttccatcaagtcaaccagggactggcacccttgcctgtcccttcgatttcttagactgtgacttaaaatgattaggtagctacacatcacagggaggagattgcctcacttggatttccttaaaagatgtaagagtgtttataataattaaagtttttttgagtccttcgttttacacacttccctgttgtttttgttaggaaaatggcatgtaggagagccttttatgtgacttctttagagttgcacgttgacagcctgcctgctgtgaggtataggaaatgcagatctgctgctcacctgtggctgggtgaggccatctgcggggccacagggcctcctgcctcctactgcagcagaagtggtctgaaggagagagggctcagtcagtcaagggcttgctgcaaagcatgatggacccctggagcagcactaggacagtgaagacaggccaatccctgaagcctgtggccagctagacagcctagctgattagataaattccaggttcattgagaccctgtctcaaaacacaaaacacacccactgctgagtacggtggatagtgtcacactcatgaccacactggttcaaaccattgggtcacaaagcaaacacttaagacatgacagtgggatggagagggtgggatgggtacgtgtgaccagaatgcattgtatctgtgcatgaaactgctagtaagtttttaaagtggagccaggcttggtggttcatgcctttaattccagcactggagaggtagaaactagcaacctctgggagttccaggacaactggattatataccttgtcttacaaacaaacaaaagtcaaacagctggagagataagttcagtggttaagagtgcttgcatcctagtgatggtggcagtgaacgcctttaatcccagcactcaggtagagacaggtggatctctgagtttgaggccagccgggactacacagagaaaaaccctgtcttggaaaatcaaaaaagaaaaagaaaaggtacttactactctaccagaggatcaaaattcatattccatgcccatcaagggcagctccctgtcacctacgactctagtaccaagagatctgaggctgcttctgacctccatgagaccaggcgtgcacatgatgcacatacatgcagggtaaatattcatttattgatttattcattttttttcaagttaggatttccctgtgtagcagctctggaactcgctctgtagaccaggctggccttgaactcacagagatcgcctgcctctgcctcccttatgctagcattaacagcgtgtgccactactgcccacaagattaaacattcataaatcaatcttttttcttcttctaaaaaagactgaccaaactccacaagtctgcctcctcacccatttaagaatacctcattagaaatccaagcgtgagcattggtgagatgattggaggtagagccaagcaagcggtggatctgagattaatcccagggccactgagtacgaggagaaaattactcccccaaattgtcctctgtctgtcacagacttgtcctgtggcattcaggagcccacatctatacagacaatgtttagaaaaacttggataagtttggcaaattgctcattgggtaaagatatttgccacacaaccctgatttcaacccctggagcacatggaaaaggtagaaagatcgaaccaatcccactggttgtgctcaggcctccacacatacccttaacatggataccacacaactgtttagggaaggagagaggatggttgtgtctcctttaaaacccgaaccggcagagggaaacttcaggaagtgggtagaaactacagacccctcttaggttcttagaaggtctgttgctcgctcgtgagtgggttcctgttcatccaagagtggctttatgcaatagggcttcctcagaacttcagagaaataactagaaaatttacagtcatgtctttaggtcactagacagctatgctattctttttcctcatctctaactcagacctgctctatttgacttgcctggtatagtaaaaaataccacacccaaagtgacatcacttcagactatcaatatttactactatgtgctagtcgctagtgactgactatactacacttagagaggaatgatctaaagaaaatagtccaaaatattaataacatccaaagaattaaatggagtgttcaaattagaatctaggattttttttttaaactccagaatccctttatactatattgcaattacaagctgagacccttctccactggcagctcagacatcctgtctaatcagacttccaagtcctagcagataaatgtctctgagtcctcaccacagctgccccatcctgcatccatctggttcgtgtgtaagatgaggatgatgatccatgctgagctaattcctgggatttttagggatcctctggaggtgagttatacgcctaatgtttctagcattcaataaccatttgttttgtttacattttttttttttgaaacagtttctctgtgtagccctagctgtcctggtacttacaggctggcctccagatcagaaatcagcctgcttctgctgcccttaagacgtgtgccaccatacccggcaccatttttttttttgatgtgttttgccttcctgtatgtatgtacccacgtgtgtgcctggtactctcagaggtcagaagaggtcatcacatatcttggagtggagctatagacgactgtgagttgtcacgtgggtgctggaaactgaacccaggtcctcagcaagagtaccaagtgctcttactaggtgagttccccttgtagtgggggatcctgcagagcactgcatctagctagcttgaattctggaatgttaccacataggttttttaaaaaaaaaccttaaaaaaaaaacaaaaaaaaacaaaaaacaaaaaaaccttgattcagtgtcttttacatcatgcatcttgatcccactcacttccctgtcccttgtccctttgcatcttccctctacccctgcaaccactcccagtaaaacacaatttaagaaaaagaaaagaacaaaattaaaaatctcgtcctggaagccacagtatgacatagtcacacagtaaatccctttgtccctgtcaacctggcaagtgttcatttcagtcattggtctggttccaggcctctggtttctactacattactctatcaatgttggccctcactgagactcttcttggatatcctgttgttgccctgtgtcatggagatcctgcagctttgggtctgaagatctggtcctttcacgtatccagtagatggcagatggggtggatgttggagcaggctaagtcctaaccctggttctgggcctgggcagctgcagggttggtctgacctccagttctcccctggcctcaccaccaggatgggctctccagcattgctctggctaatttcacccttgaagcaatgagctaggggtggggcaaattctcctgctttcatgctccaacttggaccatacaggccagctcttctgtgttgcccaggccaggtgaaggggccactctcccaagtgctgaagctggtgaggggcagggacagccctcccactgttatgaccccggggatagctcctccacctgcctcaggctttgatggtcaggggttgacagggagggcaagcataaagggaacggctctcccttgcttgacagacacatcggtgtcacctaggcttttaactggcgtttgtgaagctaccttttgtgatagttaacctttagtttgagacgtttgattcttatccgaattcttcatgaaggggttagaacctgactccaggctcactacttgccagtgttttaacctaagttttctagaaaccaatgttttccgtaaactgtaagagtttcaaaccttcaagacaggactgtgggaaaatgggtcccattttacaggcgagataatagtatggcagagatgtcaagaatactctccaaagaaacacaggagtgcgggggtcagcaattaaatcttacaggcgcagggcagtcctgcccggttgatcccggagcttgctcctgaggtgcccaacttcggggctgcccgtgtgctcagctcatttgggctctcgtctctgcatccatgcgggccaaagggagtttccgcgacggtcggcctccgcccggggacccggtcccaccctgaaagcagacgcggagacccggcgcctcttccgcactgccgctgcggcctccgctggctcgcgtcagcccgcccttacccactggctcctgataggctgcccgagctgtccgtctcggccaagagctgtgcgcaggctcagaagggcggggaactcgctgagcgtcggcgcctnnnnnnnnnnnnnnnnnnnnnnnnnnnnnnnnnnnnnnnnnnnnnnnnnnnaccggaagctggtgtgtgaggggacgccgcggagacccgccctcccgtttgcttgccttgcgtctggggccgtgttgggcgaccctagccaggctggagcgctgccgggggtcccctagacgccgtccccctgcgtcttcacactcggagcccggaggcagccgtgtgggactccaactcggacccaccggcttggcggccgcctgtgggctgtttggtggggaccggcgggcccaccctggggcatcctagagccttcctcccacctgacgagttgtgcacaagttaaaaggccttttccagcgttaaagcagacctcagtctcagggctggcatgatggtgcacgcccgaagtcccagctctgggaaggccgggatttgcacttcagggccagccggagctgtaaacacgaggccgtgtcgcaaaacaaaaacttgaatagaaactgttttagtttaatgtgtatgaataatgttttgcctgcatgtatatgtctctgcaccattagggtgcctggagctggcaggccgtaagagggggtcggatcttttggacctggatttacgatggctgtgagccaccgaattgggtgctgggagtcaaattagggtcttttgggaaagcgttcagtgctttaaaatactgagccatctcttcagcccctcgaaaactataggaaggaaactatacataagaaactgacaaggaaaacagaaagcactgtttctcaacctatgggttgagaccccttgaggtcgcatatcagatacagcaaaatgaattatgaagtagcaatgaaaataatttggtggtggtggtgtcaccacaacatgaggaaggttgagaaccactgacctagaggcaactacttaggcacattgtttttatttgctgtagctaccattgactattcaattgggggttctatgtttctcattacaccacaaagaatgtctccacaccatcaaaacagtattgcttcacgtttgtgtaacgctatctttcacaagacttaactgtgaaaacttaagggactggaaagatgggctcagccattatgagcatttgaagatgggttcagttccttcccagcacccacgtgtctgcttacagaggtctgcaactccaattccagatctgatcatttcttctggcttctgcagggtcctacaggcacatgtcacatatgtgtacactctagcacacatacacacacacataaaatatataatttaaacattttaatagcatatttacagctttaagaaatagatttcagtggaaaataatgtttctcatccatccctaaccccagcttcagtctccttcaggaacagccggtttcttgtatatttatacacgcatgtgtatgccttgtttttaatactgaagtggtagctttctatgatgagtactgtgctgctgtttgcactcataaaatcattacatatttagattaacaaatgaactcatgcagcactgtcatacatagtctttaagaagtgcatgtgctcccttcttgacagttgggtatgcttccttctggatttgtttggtgtgtagggactcttttcctttgttccttttatagcccaagctacttcaatttgccatttaaccaaagatgatctttgaactcccaatccttcatctacctcttcagtgctgggattttggttatgtgccaccatacccagcaacattattgtattgatagataagctgcttattgcacaagactagaacagtttatgcatgtttgccatacagtttcctttatgataaatataaacatgcttattctggtctggagccatggcgcagtgatcatgagcacatactactcttcagaggatcggagttaggttcccaaagctcacaactgcttgtaactccagctccaggaaaccagcaccctcttctggcctcctgggtcactatacttatgtatataaacctacacacataaaggtatgattacaaaataataattatatataacatgtatacatactcatattttcactcatttattctctgttcacttaaaaatatctaccattgccaggcatggtagctcacatctttactaccagcacttgggaagcagaggcaggcacatctctgagttcagtgctagaccctgtctcaattaaaaaaaaaaaaaaaaggcggtaatggcgcacacctttaatcccagcactcagaaggcagaaacaggtggatctttgtgagtttgaggatcagcctgggctataaagccagtttctagacatctagggctgttacacagaaaaactctgtctcaaaaaaacaaaaacacaaacaacaacaacaacaacaacaaaaaaccctatcattacaaggggctgtggatttgaaccctaggatcatacactcacactcattccaaacacacacacacacactttttctaaacctacttcattttaaggctgcatagtagtgtcctatgcccatgtattcatttagtttacagtctcttctccagtgctaaagtaaactgcccttgtttcaacactgctgccagtgtttccacaggatagtgtatattggtgggaactccttgttagtacaattacataaaatcatccatactttgtgttcatttttttctccactatgtaatagagaaaaaacacactttaaaactttttttggttttttgagacagggtttctctgtgtagcgttggagcttatcctggcactcgctctggagaccaggcctgcctctgcctcccaagtgctgggattaaaggcattttaaaagccaacggccggcttttttaactattatgtagtaagtaaaagtaatttatcataaagatgatataatgacattatgctttggacattaaataaaaaccaaatatgaacatcttgaaagatacaccagtgaaaaaagaacaggaaagggggaaaacagtgctgagttctgggattaaatatgtgcaccaccatgcccaaacatgggtgtactaaaatttggcaaaccatttccctggggtacaagctaagttgtttccagttcttaagtcaaagtcataatgctatggtctataatttttgcttgtttagattatttccttataatgataattttcaaaatggaggcaaaaggacccagcccttaagagtttttacagtgtattgtgttgcttccctgggaggttattcacctcaagagctttgacttaatgagaccaacattaaaaaagtgctgcattgctgaaacttttcattcatttacaaggaataatggtctttgtatataggtgtttgtaatttatcttagatttgttttctacctctcattggacacattattttccttaatcattttatgtaatatttttaaagttattttcctgttaaactttgctatactaaagataaaactcaaggtcacatgcctgctgggctatgttctgtcatctacctttattttgagacagccaccttacgtcgtagctcaggcaggcctttaatgcacttgtgtagctcagactggcctgaacctcatcagttttcctaaatgctaagatactgagataccgggtgtggtggcaccagaccccacaaatcctgacctttattggtgcacatacatctaactagagaacacataaccttgcctcctcttcacctctgtatagagtatatttatttcacataatcataagctaaatcagtttaatcaggggtgatagagatgggctcagtagttaaaagtatttgctactcaaccatgagaactaatctttgaacacttatgttgggcagttcacagatacctttaacttcagacagctcaaggtcctgatgccatctttggccctctgcatgcacctgtgcacacagatgcatatattctcaaacaaatgaatcaaagattaaaaacaggctacataattaggccgggtctccacagaccaaaaaataagaaaatatcaagagtccagggcagaaggaaagccacaagttggaggcctgcctgggccataaagtgaaagtcttgcctcaaaacaaaacacacacacaaaccagtaacagactcttagttatttttctagtgtgtgaagaaacaccatgaccgtgggaactcataaaagcaagcattaactgggggcttgcttgctgcttcagtgggttagtctatttctaccatcatgggaggaagcagacaggcatggcactgaagcagtagctgggagctttacatcctgatccacaggcagtgagcaagccaagccagacagacagacagagggcctggcatgggcttttgaagtctcaaagcctatctgcagtgacacaccttcaagttcacaccaacttggaaaccaaagattcagctaactacagaacttatagaagacagtgtttgatttgggcttgtggtttcagagggttagagtccgtgatggctgtgcaaaggcatggcagcaggaactactgtgaacttgcatcttcatctgcaaattggaggcagagagactgggaatggcctgagtctcttgaaacctcataacattatacctccaaatactccaaatattcacacataggagcctacggggccattttaattcaagtcaccacataaacatgttatctattctttattattatgcagtgttctgtctgcgtgtatgactgcaggccagaagagggcaccagatcccaccatgtagttgctgggaattgaattgaggacctctggaagagcagccagtgctctcaacctctgagccattttaagaggttgagtatggtgctgtgggaaggcagaggcaggtgaatctctgtgagttcaaggtcagcctggtctacagaggagttccaggacagccagggctgtacaaaaacaaaaaaacaaaaaaacctgtttgaaaaacaaatgatactgaatgtgtcaagctccacagcccccatagtagtgagctctcagggaatggagcgaacatttgtgtttccctgtttatgtgtatgagcatcacacgtgtgcctggtgcccaaggatgccagaaaagtatgatgaatacggaacttgaattacagatagttgtgagctgccatttgggtactgggaactgaacctaggtcctctctctgcaagagtagtaagtgctcttaactgctgagcttttacttcccaagtgctgggattacagacctatagcacaattggctgactagatattttctttttcctgcctctggcttccaaatgctggggtttataggtggaaccaacaatggccagcaaaaatgactgttttgaaaaaaatacagtctataattccatgttctgtatggctttgttttcatctcaagatttcttgtttctaggaagttgtagccacatggaaaatacttttggtgtcttagtttttgtggaatgtcaatcccagacttttgaggtggttccatggcctagtctcttagctaatgagaagcacacttgcagtggatgtttggtgtttcccgtggccctttcctgattactgggcatttctcctctgtttgcttttgtagatgtcattgcagctggcatcttgtagcattcttttgctctttggggttgtttccataggatggattcccagttgggtgactaggacctacctatagtgtttccccttaacacccagaacagcacctagcacgtactaggaggtcagtaagtctgaaatgaccaggatatcagacatgtatgccacactgattgtactgtcctccacagagccagccctgccctttacacaggttctagatcttagaggcatcaggctgcttgccactttgtaggaggagcctctgcccatccctgcagcatctggcactattgttacaggaagtgggtggtggtgactggattgtcagcctgtcttcccagaaaaacaatccattgtgctatctttagttgttcaggagcccccagccctagcccctttgtcctaggaaatagggaaccattttttctgcaaatggtacccctgtttctaaagaccatctgctttggatgttttgttgtttttgttttgttttgttttgagacatgtagatcaggctacccttgaactctcagagatacacatgccaggctcaaacactctgcctttgaggagcttgactagattttgaacctctggagggggtaccctgagagaacgcatacttcaagaccaggttcccagccatggggtgaggagggaccattaggcttctgtttatgggcccctactgtgctgaccactgtggagactgagtaattagagacagtacctgacacatgtctcacaaaagcacagtcaagggcttgaagggttggaggcacgatcattgattataggcttcatagaagaggtgatgtcttagttggtctggaaggctattgggtttcagagaagaagccttgtaaatttttgggggactggggagagccaggtgtggtggtgcacacctttaataccagcactcaggaggcagaggaaggcaatcccttagtttgaggctagcctgatctacatagtgagttccaggaaagcgagggctatgtagagaccctgtctcaaaaactaaaaatatagacaatagatgtgactgcagatggagtatagatggaaggtaaagtcttgaagtggcaagttagaagagtctaaacaagttccatgtgctaggacatcccaccttgagcagtttctggataatcagaattagtaagccccttcctaaggcacatttcctgtgcctatatgtcaaatgttactctgtctaagatgacagattaagtcaccaggtttattgtggagttattttgctcctttgaaatattttcatttgtgacatttgattcacagaaacaaaatgcctctttgctgtttagggttttttgtttttgttttttgttttttttttggttgtttttcaaatcaaagtactgtaccatatgtgtgagtcatgggtgtctgtactccagaaatagtgtttatagtctgttctcagatagccgatgggcagggaggggataactgcctggtggtaaagagccagaagcagtgctcctcatggctggggctgaagctctttctaggccagtgggggcctaaggagcactctacctgggcttggcccggacagctttggggaagtgccaaatgtctgggtgttactctcattcatctgctgggctctgaagacctaatcttggtctcctttttctggcaggcagaggtggaggaaacactcaagagacttcagagccagaaaggagtgcaaggaatcatcgtggtgaacacagaaggtaggtcctcaatccacggcctgcactcaggagggcctccagaaaacagccacacacatgtcgttgcccttcctagtaccttcataaacccagattcattctagttttgttttgaacatttccaaagttctgatactattcttgggatttttcctcctcttttcgagaggtcttgctgtgtaacctgagttgtcctggcactcaggatccttctgcttcacctctcacgtgctagagttatgggcatgcaccacttgttttagaaatcttaatttcagccaggtggtggcggcggcgcacgcctttcatcccagcacttaggaggcagaggaaagatctctatgagttcgaggccagcatggtctacaaagcgagttccaggaaagactccaaagttacagagagaaaccctgtctcgaaaaaccaaaccaaaaaagaaaaagaaaaacaaaacaaaacttaatttagtaaataggaaaattttttttctcggtttcatttcactgacaggtcacagctgtcaatataatccatgctgttttcagcccttgtgaaaaatctatttctcatgtgataatcagttacttttgtttttgaaataaagtctcactgtcctcaattcacagagatccctttgcttcctgagggctgggtttaaagtgtgcacagtcagagccaggatagtagttggatcactgtattggaggccagcctaggctacatagttccggaacaactgtctcagaaaaagtagcaaaaaaaatcaagtgttttccatcacacctgattgttgttactcttttaaacatgtttaccttgaggttttgttttgcaatttcttcaaaaactttttttttttgcactaagaattgaccccaggcttcatacccattaagcaagtactttaccactgaaatgctccttcagccccttcaagcaaaaatttaaagtgtcagtacaattttttgagacagtatcttttctttgtagtttggactagcctgaactcattgtgtagcccaggatggctagactttaaggcattccttgtacccgagtctgtctgctcgggttacaaacttgagtcaccatgcccaattaagtacggtgctgattaatctgttggtgctactcttggtgctcactagttgggtgttgtgcatccatctgtgataattctgctgtttttgtaggtaattctctggttgatttctttgtgcccagagctctttgagggaatgagcttacttgaatggctagtaagatacggatagtgtgtgaagggaactaggaaacacccacattgtaccaaatcagaggacaggtgctttattccttcaagcagcctattggctctattgacaaaacttgaatttagaaatttaatgactgcttctcatttcaaagccaagaccttttctaagatttatttttgttttctgaatgttttgcctgcatataagtatgtactatgtgtgtgcagtgcatgaggccaaaagagaatgttagatcccctagaactgtagttacaggaggttgtgacagtatatctgcaatgtctgtattcaagaggaggatcatggcaaattccaagctattctggtccacatcgtgaattctaggtcagtcaaggttatataatgagaccctggttcaaagaggtgggggtgagtggtggtaggcaattttttttttttttaaaccataacccattttaccaacaagaaagttgagatagagatcaagtaggtacctggcatgatagcacaagcctgcaatcccagcctttgggagatagtagcccaagagagtcatcctcaattgcatggtgaatttaaggacagcctaaatgacaccttgggctccaaaaaaacaagtggggagcagtttgggccaggccaattaagtgatgtacctagtaggattgttcaagttctgcatggtcaacaacagagtacctgctctcttttgctcccaacacaactaggttagtacagaatgtgtgcttcatagcagtatctattaagattttcctttttcagtgctgtggctcaaactcattgccttgtacatactaggtaaatacccagaagccctattaaaggtcttgggcaggttttttgttgttgttgttgctctgagagcacctgactgtaccatacctagaattgtgcttccccggtaactaaagctgcacagtatttttgaaggaaaaggactgaactaggcatccgtgaggagtatagacttaattttgtccttgtttgaaattcttctgatttttgtttcttgcccaccctccctctgtctctctctcctctcctctcctctctttctctctgcctcagagtgagccactattggttaagtttgctggctcctttacatttgcctactttatatataaccaaactcattgttatctgaaccactaaaagtaaaccccagaaacaactcaaataccaacatcagcagatgcttaacatgttaaccacagatgctaatgagagcgggtcctgcctcgagagaacttattgcctagtgggacgtgggtaaaatgtctactttcctaatagtgtggtgttgggattataactactctaaaggaaaactgcatggtactgggatgtcatcagacttgagggtcctccctctaggatcattcgattttggatagattatagtaggtaccagttatagtaggtagcaggcacatagccaccctcagaaaggtacagctataaagaggcctcatggggctcaggtgtgcacattgttgccatctaggacccaatagcagcacagcacttagggcccacatcagcaccttaaaggcaaatgactactgtaacccgttcttatagcttcacatggctcacaaaagcctcttctgctcggctgctttacatgtttctggtgccctaataaagtaggttgaatacctatctttgacttatctttaggctggtcacttattggccagattcacagattcctgggcccatgtcttgcttcttggatgtgaagagtcacttataccacattcttaagtgtcatagtcacctccagacttaccttggatggagccttctgacaggtcacagccaattccaggaacctgatgacccaatgtggtcatcaggttgagccacattcctcacctccataacagtaggacacccagtaatgtccatttaattgttcagtcttcaaaaagagacttgatacagaatgatggtcattggctggttaattataccagtaaaatcctagcctgagcatctatcaataggggaatgttgaatctagggactgtcttacttcatggactctttctatgttttgttgtgtggtgctgggtattggacccgggtctcagacacacaaagtactctggactatacctccaaccacttagtgggctctttcaaagacagcagtgctcttatataaaaacccactggagtggggaggcatcttcatttatacatggttacagctgagccctgagtcagccctgctaaaaataataataaatgtctcgtatatctggtataagctgacctctttttcttcctccttttcagtctcttctttttgagacagggtctcactgtgtagccctagctggcctttaacctagggatctgcctgcctttgcttccccagtgatgactgagttcaagctttaagtgttgcagaagagtacctctccttctattgcttgaacccagtcaggcagagtgggttccatgctcctaggaaaggagcatggagttgaatcaagtctacatttaaatccttatcctttgtgtacttataggcaggtcaccccattattcagttctcctgttgcctggtagccaatgaagatggtgatcctacccacagaggctccggcttacaaggtcagcactgtgcctgtcctataacaagccttcagtaaacagtagcattggttggtaactgccagcccagcattctagaattagggatgtgagatgagacactaaacagaaaggaactcccgtatattgcttggtttccatttattcttcccacaggcattcccatcaagagcaccatggacaaccccactactacacagtatgccaacctcatgcacaacttcatcttgaaggcacggagcactgtgcgtgaaattgacccccaaaatgacctaaccttccttcgaattcgctccaagaaaaatgaaattatggttgcaccaggtaagggttcttgcacctccatgtttagtttcagaacccatagcaggttccctgtggcttatctggaaagtgtggcatattgttatccccacagcttcaaggtaggcccagagtggggtggaaagagtcaagttgcctcactgcctagccagtatctaggtggtatccaccacctgatcttcagcaggcctcacatggaaattgtagtttcatgagggagaaagacacaaacatcaatactgaatcattctcatcttggtaagaattccttaagaatatgggatatggcctggcgttggtgacgcagccacttgggaggcagaggcagccggatctctgtgagttcgaggccagcctggtctacagagcaggtgccaggataggttccatagcaatacagagaaaccctgtctcaaaaaaccagaaaagaaagaaaggaaggaaggaaggaaggaaggaaggaaggaaggaaggaaggaagaatgaatgaatgaatgaatgaatgaatgaatgaatttgggatgtggaagggttgatcaggtctgcctgggcagtcaacaaagatttctcagaagcaggatgttagagctgaatcttaagggccagggaaatatgagtcagagaggtgggaaagctgtttctatatgaaaaagaatttatagtcctgtctccaacccatgcagtcaactccccaccagcattggagcagattgctattttggctcatcagtgaaaaacttgtctgggtagtacaagcatgcctgtgtttaggccttaggatcattgtcagtgtaatgagatgtttcacacttggaggagcccacaaggatgggaactgcagagggaaggcatggggttgcctcctgctctgccttatctaactcaaactcacagactagagtgactgacgggttctacaaaactatttttctgtggttaccactctctctgtcttttcagccaagccatggctgggacatgcatgagatctcacatggtggtgcctcaggttgtagaacagcttgtctgtgaaggaaggtatgaaaagtgagacttgggtccaacttagaaggggcctcagactccaaactcagctatgtggatctgatcctgtgagcagaggtgctagggcaggaagtgatgatcatgagttggggtgcagggtggtggcggctcatacctttaattctagcacttgggaggcagaggcaggcaaatctctgagttggaggccaacctgatctacagagtgagcttcaggacagccagggctacacagagaaaccctgtctggaaaaaccaaaaagggaaaaggggaaaaaaaaaaaaaaaaaaaaatgaggagctgttgtgaccccctgggacacatcaggaagagtaagtatgttaagatcaggttatcattaagccttgcaatcaaatttgaatagaaagtccacccccaccccagcttactgctccatgtccctaaaactgatattgggaatcatctttccatttagtagttatcagtgcagatatgaggtatacccagtggcacacctagaaactcagtatcagggacaaatgatacagtgccatggagacaaacacttggtacacagtgtctctccacctaaagctccagagatgtctgaagtcctgatcatgcaagtcttagctcagttcagtagtacctccagtttgtccttggggacccacagacattcagcgcccccaagggtagttggtacttgagttctcattgggcttcatgggctcagtggttccaacagtctcatcagtggagatgaatggccagactctcacctgggcagcatacagagaggtgcaggaagtgcacatgctggccttgatctggctggtagtcggtacgtctcacacactcacactcaagttatgctaaaggttgtgtgtgacatgttagccataaacagtggtgtttatggagctaccacactgctgcatctcccttcctggggccttgtcacacacatcctcctgctagagcatgctgtcattccttattgcctgactaaccagctacttagctacatttccactgctttctatttcccacagtaagttgtatgaaggcaggaacttgtaagcagtgtttaacaaatacattaaacaggtggcttttgttgttgttttgagataaggtttctcgacatagccctggctgttctggaactagtgagtttccttggtctactagtgtagaccaagtttgccaagaattcagatgtccacctgcctctgcctcccaagtactgggatcaaaggcatatgcccccatgcctgaccccagtatggctttaatttcctccctttgcagatatccccctgttgggcattaggctggattcagtagagggtagagttaaggatgtctgggatgtggcatttaaatatatgtgtgtgcatgcagcaatggtggaggtcagagggcaccagaactggagcaacattatgagctgccatgtggatgctaggaactaagtgtaggtcctctacaagagcattaagtactcttaaccagttgctaagctggaaccagccctggaatgaaatcagcagtacatactacttagtgtacccagttttatgtggtcaatacagaaattctgggtttggagccagaactcagtgagcaggaacctcagaggcagtagagcaaaatgtctgaggattgcttcagggcagccccagtgtggatcaggcctcactgagtcttggaggggaggcttgtggtttcaccatgcagtatgagcagactggagagaaggaaggaaaaggttcacataaatggacttcttacagcttcccaggccatatcttagatatttgacatagttggacttattaacctcactatttgatgcagtgtgaaaaacctttactactatgtccctggctgtccagatggctgagccagtaaaggctcttgccaccaatcctgaccacctgagcttgagtcctggcatccacatggtataagatcaaccgcttttgaaagttcctgcaagaaccactcttctgacttctacctacacattacaacatgtgctcgcacacacactaaagtttaaaatgtaaaacactgcctcccacagggtacttagtgtggtattgtaatatttagaacttgatagcctagttttgttggttgtttttgctgttaagcttgttaattatgtatgcagtttcttcttatttgagacagccagttgtcatgggtttattagtaaaatggtagaccacttggcacccacgtagagtgtttctggggttaatttaggtgtcacctgagaaaacttattcatgacaaagctaaatactggcatacagacacagtcagatgcccagaaattaatggcaacttctgtatacctgtaaaacctgcagtctttgtcatcaagatcagggcttctggcctggagaggtacctcagcagttaagaatactggctgctcttccaaaggtcctgaattcaattcccagcaaccacatggtaggatacaaccatatatagtggaatctgatgccttcttctggcatggagttgtccatgccgatagagcattcatatacataaaataaataaatcttaaaaaaaaaaaaatcagaggctgggcattggttgtgcacgcctttattctcagcactcaagagacagaggcaggcagatctttgagttcgatgccagcctggtctacagagcgagtttcagaacaggctccaaaacaatacagagaaaccctgtctcaaaaaaccaaaccaaacaaaaatcagagctttcatggcctgagcccataggttcaaaccatgctgcatactgcttcaccctcatcagatctgaggcacctatgttaaactcagcaaaggttcattgaacctttgtctaaagtccataaatgaatttgggattgagggtatatctcagtgcacttgcctagcatttaacaagaccatggcttagtcctttagtaccacaaaataaactgatggaaaacatgatcaaaatctgagttttgccttgacagacagcactttgccctgtttttttttttttttttttgctaaatgaagcctgtcatctctatgggattgtatcactggaaaatgctttaaagaagcaaataactggccgagcgttggtggtgcacgcctttaatcccagcacttgggaggcaggcacaggcggatctctgtgagttcgagaccagcttggtctccaagagctagttccaggacagcctccaaagccacagagaaaccttgtctcaaacaaacaaacaaacaaacaaaaacaagcaaataacttcctgtgacctatcaaaatgttctgtttttcaggggctgggagcacatgttgtagaaggtagaaatcagccacaggccagggttatcaggatgaagtaaggcagtggttttcagccttcctaatgctacgaaccttttaatacagttcctcatgttgaggtgacgccaaccatgaaattatttcattgctacttcataaccctaattttgctactgttatgaattgtaaatatctgatatgcaaactacaaatggatcactacccactgaactaaggcgcccagcaatcacgttgaaatctcatttatactaatgtatgtgtgtgcacccacactcaagtgcagaagttagagtacaacccttaggagttggttgttgctatcatgtgtgtcctgggattcaatcctcaggttatcaggctatcttgcttatatcttcataatacaaatgaaagagcatgctgtaaagtgtccaactttacagctggtcctgcatgtggagactcattttctagcagccacttggcaggaggcaataaataaacttgtaggttaactcctgttcccagctgtggaaaataacctgctactgatgctcttctgaaagtctttttcctcctgccttgtatgctgttgtctttcttgtggtttatgtttctcgtggtttatgtttagtgatttgtttttctgttttttcctttttcagataaagactatttcctgattgtgattcagaatccaaccgaataagccactatctcagcttcctgtgtcattccttaatttaaggtcccccaagagtaatagtgttaatcatgtcagtgggcacatggtggttgcctaagagcccatgtagactatgccattgatcaagggtatctctgtccaccccaacaaggagtgtctctggtgatccagtcagttcctaggaaagctcagttcttatttccaggctttggagtaagagcttatgataagcccaggctttggagtaagagcttatgataagcccacacccagcttccttcagaccttgagttcactttgtcacccttggaaagcctgttttttctttaactaaaaataacttcaaaacctgctggctgtttgttgtgtctttactagattggaaaggtctgttcctatgtcagcacatgatcagctgaccaaacccatggcctctattccctggcaggttttcatggtcccttggcctggtcctcattgcacctgtggcatacttcctgaataatgcaccttggtatgtattggttggtgccctggttcctgggcctcattaccccttccttaggtacctgtttgatcaaatcctactcctgctaatgattttctgttgcactgccctgagcgaagaagaaagtgctgtctaccaagtacccacaatgcacctggtgcatcttaggtgctcacatcattgtgttaaaactgcctgagagctggggaattaagagtaatgaaaggaggaggaaacaggtactttccagggtctcatagctgggaacatgggtctgtaggtagcctgttctttgctcagtcttcctcagaaactgaccccgtctttccctggcaagctcgttcttggtagtcatccttccacctgtaccactatgtgcaaggtggtgggggtccttaccaggaggtctaccccaggctcttagactacccactctgctgcgcctcaccaccctgaaaaccacctgtatttgccattacacttttgttttcttttgcttgttgcatagaaaaaaagtcctaggttcaatccccagaattccataaatggcatgtatctagttagagttatgaaactctgcctttaaaaaaaaaaaagattcaggggctggagagatggctcagaggttaagagccctggctgcttttcccgaggtcctgagttcaattcccaacaaccacatggtggctcacaaccatctatagtgagatctgttgcgcttttctggtttgcaggcagaacactgtatacataataaataaatctttaaaaaaagattcagaattaataaaaagagactgaatttgaaagcaagcaaggagagttgtatgggagggtttggtaggaggaaagggtagggaaaacaatgtaattataacctcaaaaatataaaaggcttggggtagagagatggctcagttattcagagaaccttgtgctcttctagaggacctaaaaaatttcagttcccagcacccaaggagtacagttcacaaatcacacacacacacacacacacacacacacacacacacacacacacacacacacacacacacactgctcttctagaggacctaaaaaatttcagttcccagcacccaaggtgtacagttcacaaatcacaaatcacaaatcacaaatcacacacacacacacacacacacacacacacacacacacacacacacacacacggagagaggagaaagcaaaagttcaagagtttggagcctggcccaggagggtgagggatgaggcaggtagctcagttggtaaaagcacttgccacctgagtttgagttctggaaccgacatgttggaagagaaaaaccaatgcccgagctaaccacctcatagctgctatggcacacataccccacaaatacatttttatttttgcatgtatacatgtgtagatccaaggggtggggcctgacccagttgtctctgccctacctggctcaagtctgctgactgaaggaacaaacttaactgtcctgactccctcagatgggtatgatactgagggactcacaggatgctgcataagtccatcttgtgattaacaaaatcctgaaaatccttcaagacaacgatcatgcccctgaaaagtagtggttgtttacaatcatcttgagaggaacagaaaggataagtaagtatgcttagttaaggtttctattgctgtgaggagataccatgattatggcaactttaatgagatggcttatatttgcagaggtttagtccattttgtcatggtgcaacatggtggcatgcaggcagacatggtgctggaaaaggagctgagaattctacatcttgacttgcaacaggaagtagtctgtctcactaggtgtagcttaagcatagagacttcaaacctcacccacacagtgacacacttcttccaacaaggccatacctcctaataatgccactcaatttaggggccactttctttcaaatcaccatattgtactccctggtccccaaaggcttgtggccgtatcataatgcaaaaacacattcagtccaccttcaaaagtccccatagtctacaacagtcttagacttgtttcaaagtctcttctgagatccatggcaatctctcaactgtaatctccctgtaaaatcaaaatcaaaaagcagatcacatacttccagcatataatgatacaggatatatattactattccaaaacctagggaataccagaccaaagcaagacctaaaaccatctggacaaactccaaactctgtgtctctgtcttatgtcaaagccctcttttgacataagacagctttattgactgaaatacatttctctcttgggctggttcttttccttgttagcagctttctttgccagctatcccattactctggcatctccaatattttggcatatcccagacaaaccaggcttcaatgtcagtttcatgagatggcccctctgggcctccattcagggacactcctgacacatgcctggtctcagctgctttccttaatcatggaggcaaattccctttcttctatccttaactccagaaccacgtggccaaagctgccaagttctgtttgtcagggctataccatctttgcccccccccccccagttaaattacatcttcaccagttttccatggtttccttcactgcctaagcttggctgtcctagcacttgctctgtacaccagactgccctcaaactcaagagatcccccagcctctgcctcctgagtgagtgctgggattaaaggcatgtatctccctctctcctccccccctcacacacacacacacagagagagagagacagagtttggcgctacatagacaagcccaagcacatcaaatgcagttagattttgtttcccattgtctcaccgggtattccctccacatggcaagagcctatctgtgacctgctcatggagacagacactgtgagcctaccctttgtcaactgtgacacagcccaaagtgtctggccttcctgcccaccttcactttcccccaatgttgctaagaggctattgagctgggagaggcaagttcacccacactgctgtgcggtcacttctagtttgcctagcatctatctgctcccctctctgttgaccaaaactgcagccagatcacccctccctgattacaggtctcacagaataaagcctcctagaaccctcctgtcacacacacacagcccaggcaaaagtatgagaccacatggaccacttggctgtgctcctgtcccagcctacctggtctccttgcatgcaccccaggaactaggtgaagggtgacagaagacccaggcgtcttcctctggcctctgcaggtacatgtatgaatatagggacttcctgagttccatttctgaaatctaaggaaggagagaattgattccataaaactgtcctctgacccacacacactgtggaatgcatcatacatacaccacacaaagatttttaaaaaatacctgaagaaggcctgataaaggcacttgctgctaagactcatgacctgagttcaatacaaggaacccaaatggtggaaaggaaaagaaccaactcccacatggtgttctctgacttgcacatatgccctatggcacgtgtacacacttacacacacacacacacacacacacacacacacacacacacacacacagaatgaataaaatttgaaaagctgggtagcagtagcaacacctttattcccagcactcaggaggcacaggcaggcagaactctgtaagttcaaggccagtctcaactacacagcaagttcccaggggagccagaaactctgtctcaaagaaaagaaaaaaaaaaccccaccccccaaacaaacaaaaaacaactagccagccaagcatcatggcactgtcctttaacattcaagcacagcctgatctgcatcgtttcatggccctcagggctacatagggagagctatctccaaacaacaaaaacacaaatgacaagaaatgctgctttggatgcagggaaaacagactacttcttcactgctagtgagaatgtaaagtggtacacccaccatagaaatcagtatggggctttcctcaaaaaactagaaatagacctactatatgatatgatccagctataccacccctggtatatacccaaaggactcaatattctactatagagatagctgctcactgatgtttatttcttctctattcacaacaaacagccaagagaggaaaacaaacaaattagatgtccatcaactgatgaactgatgcaaatatggcatatttacacagcagagtatttagctattaagaaaaatgaaactataaaattcacaggtaaatggagagagatagaaacaatcattctgcgtatggtaactcagaaccaaaatgtcaaatgtcacatgtttttctctcatctgtggatgttagcttcagatatgtgtgtttcatttaaaacactcacaaatgttaagtattggactcccgattactgtgtatcctcccatgatgcaataagccaaaacaaatccaatgaataagaacagatttaatacacagagcaaagcacagcgatgcaactcccaggtgactctggaagacgggagagagatcacatggcaggtctggtgaccaggtcttaaacaccctgtatgtgtggtcttgagcagctccagcggaggagctgatccttgacaagctttctgaggggtggcgtctggaatgggaggatgggggctatgttccaaagctgaacatatgggcagggtttggaatgggggagagtgaggctggagtgaaggcagagcttccaccttgaaggtcaggaagttactaaggtgccatgttccagggagaggagataaactgcactggtatgaaggaatcatggaacaggaagggttaaactagggtgaggaagtggagggcagagcagaggacagagtagagcaagggataaataatactgaaaaccttttgaaaaagacataaagctctttctaaatctatccatcaccaccacacacacacacacacacacacacacacagacacacacacacactaaaatggagttactctgtaacagagcaacagtgctcctactagacatcagaggctaacaaaaagttcagtgccaggtatgagttgcctgttggtgttgttggtgggtacggccactgctcttggttaccctcctccaggcagtcagaaccttgctgaagacagcacatgcttgagtcatagaacatggcaaaaaccaagctggtttgaacctggaagctttatccctagtgaccagctagctttcataatctggaaagtcgctatgcaagtttttggagaggaaagttgttagtcatactcagctgtggacccttcaagctaaaaaaatgactgttaatagtagcacaaacatcttgggaagaaccaaccaccttttgattgaatctaaatccctgtctacaggatgaaactcatacctggcatcattatcaggctaagagcctctggctaaaaagtcaccagccatgggaaaaacccattactgttatgctgctaaatggacgtattattaaactgactcctaatgacttacattgtattcacagatcaatgtacatctcatcccttatctgagaagcttctaattgcaataaatagtgattaatacagagactcacaactagttatggtacagataagagactatagaatgttcagtcctaaagggatcacatataatgcaccctcctctctcaaggctaagggatcattgcagaagaggtggaggaaacagtgtaagacactgagacagtggatgactacaagaaaacatctttggacacaacagggcagctgcacacataaactctcagtagttgcaacagcatgtataaaacctgtgcaaatcctagcaagaagagaggagctgggcacacaattatcattccaggccacaaaactactggcaattgctagctactgggaaagggataggcaattttctctaagagtgcgccccctggtaaaggttatttaaccattcactgtagaagatcacatatccaagaacatttgacatcacaaaattggtcttggaggtgaaaaaaaattacacaaacttgggtaggtagaaagggagaaggtaagaaaaaaaaaaaaagaaacccatgaaactctcatagagaggctagagaaatggcttaactgatgttaagacgacttgaacttgaatagcagtgctcacatcagagggttcacaacctcctgtaactctagttccaggggaatccaactctgtcttctgggctctgtggtcactagacatgcacatggtgcacatacatacatgcaggccaaatgtttttataaataaaatctcagagaactaataaaaattctttaaatattgtatatgagtatgtgtgtgggggggtatgtgcctctgggttagtcagttcttcagttaaccatgtaggccctggaactcagatcagtcttgaaagcaagtgcctttacctccttgtaactttaaaatatttcatgtcatttaccctagtccaaaggctcacaacagtaatcccatctactgagaccagaggatctgaagttcaaggttttcccaggtttcagagttccagggcagccagggctacacagagaaaacctgtctcaaataaacaaagtcaaatttgttacttatacaataataagcttgatctcttgctcctccttgcctacaccttccaagtgataggattatggacatgagccattagcatattaaatttaaaaatcctagccaagcgatggtggcacacaaacctttgatccagcactggggaggcagaagcagatggatctctgtgagtacaaggtcagcctggtgttactgagcaagttccaagacagcctccaaagctacaaagaaacccctggtctggaaaaaacaaaaaacaaaaccaattttaaatcttagccaggcatttcttaagagagtaaatgtccctgtcccacaactcagcaattttgttcagcatttgtccaagtgaaataataaaacagccacacaacagttagaagaaatccacacaaaggaaattcatccagtctatgtgaagctggggaacaaacccagagtttcctgcaatcgaggcaagcactctaacaattgaactacatccccagcatgttgtatttccataggtgattgcaatgaatgtaaaatttctccagctctcactttgtgctatttacttttcaacataatctgcttctggcttccatgtttcattgtccttcactaatcccaccccctctttctttcttctgtatttgaaaccatattttacatttctataatcttggtttttttttttttttttttttggtttttcaagacagggtttctctgtgtagctttgaagcctatcctggcactcgctctggagaccaggctggcctcgaactcgcctgcctctgcctcccaagtgctgggattaaaggcaggcgccaccatttttattatcttaatgagccctcttgttttaattttttttttttacatttatttacgatgtgtatgtggaagtcagagatagcttgtaggtgctggtgttcttctcccaccacaaaggtcctgctttaaatattaaaaattctttccaggatcagtaaagagatgccctgagacagacttactattctgcctactcaccacagggaaaacaggaatgtgaaatactttctgtaggaggaatgtcttgtagtagtgaaggtactaaataggacttaaggccataattcaggaaacctactgtcctaccctaatttgtgggggctacatactagcttagcatttgagggatataaggcctggctgatgtctgcaggggcagcctctttgatctaaccttggaattgaactcaggtcctcgtgcttgagggcaaacactcttgtctacagtgccatatagctgccttccttttactgtttgaaatatgtacctgaacaagcagacaataatatacttctttaagattttatttatttatcatgtatacaacattctgcttccatgtatatctgcacaccagcagagggcatcagatctcataacagatggttgtgagccaccatgtggttgctgggaattgaactcaggacctctggaagagcagtcggtgctcttaacctctgagccatctctccagcccaataatatacttttaaacatatccagcttcctaggacatacaaaaaaacaaaacaaaacaaagccgggcagtggtggcacaagccttaattccaggagacagaggctgaggcagaggcaggggaatctctgtgtttgaggccagcctggtctacaaagtatgttcaggacagctagggctgttacacagagagaccaattttgaaagttctttaggagctgcctctccgtgtccatgctccccacttcccataaagcctgggaaaatgaatttaagccttcctcgaggtaggaaagtactgttccctgcgtaacattcctagactatacttctttctagcttctcaaagggctctacgtgtgaattctcagttcgtgtgttgtcaattccgcatgttctctattgcctggtaagctgcttctgatacatcctcccattccgtgatttttctctcctactttatctacatcgcctattaaccccacatcgggagactatgctttttacggctgatgcagaaactttttaaagcccggcggggtgggagtggggagctggagcgttagttagctccacagttaagagcactcgctactattacagaggagctcggttcggttcccagcaccgccagtaactcactccagcctccggaaatccgactttgacctcctcgggcacccgcactcgcgtcgtacacagacacgtaaaacttttaaaagccggggcgttccactccctccccgcccggtagtaacccgcccgtcctccgttactacctttgatctctaagttcagtgaaggggcagtgtcaagcgctggaggggacgaccaaccggctttcccctcagtctgaggagccaagagacaagccagcnnnnnnnnnnnnnnnnnnnnnnnnnnnnnnnnnnnnnnnnnnnnnnnnnnnnnnnnnnnnnnnnnnnnnnnnnnnnnnnnnnnnnnnnnnnnnnnnnnnnnnnnnnnnnnnnnnnnnnnnnnnnnnnnnnnnnnnnnnnnnnnnnnnnnnnnnnnnnnnnnnnnnnnnnnnnnnnnnnnnnnnnnnnnnnnnnnnnnnnnnnnnnnnnnnnnnnnnnnnnnnnnnnnnnnnnnnnnnnnnnnnnnnnnnnnnnnnnnnnnnnnnnnnnnnnnnnnnnnnnnnnnnnnnnnnnnnnnnnnnnnnnnnnnnnnnnnnnnnnnnnnnnnnnnnnnnnnnnnnnnnnnnnnnnnnnnnnnnnnnnnnnnnnnnnnnnnnnnnnnnnnnnnnnnnnnnnnnnnnnnnnnnnnnnnnnnnnnnnnnnnnnnnnnnnnnnnnnnnnnnnnnnnnnnnnnnnnnnnnnnnnnnnnnnnnnnnnnnnnnnnnnnnnnnnnnnnnnnnnnnncgggcctcacgccgagtgctgtccgcagctgaccgctgtaaggaggtgcagcagatccgcgaccagcaccccagcaagatcccggtgagtctctagcccccccggccctggcctgtcctgccaggccccgcccctggctcacgagtcccccgcccactatgctcccaggtgatcatcgagcgctacaagggtgagaagcagctgcctgtcctggataagaccaagtttctggtcccagaccatgttaacatgagcgagttggtcaagatcatccggtgcgtgggcagcctcctgaagcccttgggtggggtcagggccaggttccactcggaaggggtggagtggggcaaggggacaggatatagggcatccagcccctgttctaggaggctggacaaggtcaaggtcggggttggagtgaacttctacaaaggtgagagcgtctagcccgggctgtgttggttcaaaagtggagattcgggagggacacccaggcccccagcaggcgacctcctcacctggcatgccctcctgcctctgcaggcgccgcctgcagctcaaccccacgcaggccttcttcctgctggtgaaccagcacagcatggtgagcgtatccacgcccatcgctgacatctacgaacaggagaaggatgaagacggattcctctacatggtctatgcctcccaagaaacctttggcttctgagtcaggaggaggggtgggggatggttggggattctggtcaagctttctccagggaggtcctggctcctaagctgagctatttcattcccgagtgggttaggcagagatgtgaactccctacccctcccctggtgggggacaccagccagcctaccatgctctggtgtaggtcctgccagtcacgttagggttgctcctctgggtactggctcagttgggagtgggtggggaacagcacccctgctgtgtggtttgtcttttttttttttttttttttttcagcccttgcctgtctgcccacctgtcccttatccacctgaggcatttgcctcctgccaggacctgcccatctctgaaaggctgaccccgttgtcctgacatggtgtatggatctgtggtcatttcctcagcaaaataaagattgcttaggcctgcctggccctttgcctccagctgcttgtttgggagtagggagggctgctaggtgaccgtctccacatacttgtgccagtcaggacacaggcttgtgttctatggacttgggtttccaaaaacctacttcttagtacaggatactctgcagtattaggggccagattcaccccactccaggaatagatggcatcagaacaacaatgaaaaaacccacacatttattaagtagccacaacctataaagccctgctcacctgcaggtttccccttccttcctgtgcagtcacaaagtgggaggtccaagtggggtgctccaaacttctccccctgggccagctatgagtcccctatggtaccagagatttgtaaccctggatttgaacctcttctgcctgaggactcgcctgctggcaactctggataagggacctggcgggctcctggcccttccccctcttgtccatgcagttctgtgccagccagggctacttgagcacaagcatagcctctgtgccgtccttggcagtcaaatagagaccatgtgtgaggtaatactcccgtcgcaggaaggcatagaagtagtcagagatgagcaggatctggcagggaagagaaaatgagaagccatggggtaccttagtgaataagtccctttgtggggttagacaggtactatgaaatagttcctgcctggcatctctcatcaaaccccaatctataagcctgcccagggatctccttccctcttggcacaaacctagccctgaaagagctcactggccatctgacagctgcctgtattttactttctgcttcctactcctggtttacacctctatcctagggaatccagatcagtgttctaccaaacagtgcatgcaccttgtctcttcccacaggcatcccccatccagcctcccttgtcaaacatcccctgtccaggggttcaggacacagacttgcctagtatttctcccatacgtacatcccagaaatctactttgaaaatatacaattccacccatccctgtaacaacccccaccaaagtcactgttgtcatttaaacattaccaaaacagcttcccagggatccctgctttgaaacctcctgtgccagtcagccagagggagcttttcttttttattttttatttttttgttttgttttgttttgtttgggttttggtttttcgagacagggattctctgtgtagcgagagcctatcctggcactcgctctggagactaggttgcccttgagatccgcctgcctctgcctcccgagtgctgggattaaaggtgtgcgccaccaacgcagagggagcttttcagaccacaaatctgatcatgctactacttgacttgagttttcccaaaggcttctcatgcttcagactcttggagcttcgtggccttgcacctggtccctgctacatgttacatcacttccatgtgctacctctctaaccacaggtctttgctgtttcctctgcctggaacatttgcatctgtcgatacctacttgctcttcaactcggttgcaggctgactttcccctgggttaggtcctaatcccttaacctctctgctgacataaagtccttcaaactgcaactttacatccaactacgtgacacttgatggtaacgctgcttctgctaaggatggaccctgagtgcttctgccacagtggcacttatctgccacagctcagtctgaccaaaaaaaccaaaaggggccgagaattccagttcattctcaccctaaatggagcctgagagagggacaggatttgtctcacttgaacacttgaccccaaagtctacaactctagcccaacatgcccaagactggaataactggaactgacatggaagtgccccacctcatcaaaggaaggcaggcacactattagagacaccacagttctcaaaagtttagaggttctcagtaccagcagcaattatctcttagctcaaatgggagacaggcctagaatgtggcaggcattcagtgagagtcttggggcagatcagaggttaaatccggggtccaagtctccagagccctgtcctgggcagatatacatttttctgaaggtagaaaagcagctaagaagatcttggagggccaaaagcattgatattcaattggacatacacctgccattatctcattggaaggctaatgatctattttaccaatagaaaaattgaagcttgaggcattcaattagttggaccaaggccataactggagatctggactactgggcatgcgtcctcaagtatgtgatgtgccatgggccctgtccataaaagaacacagcccttggccagcctggtcgtatcagcagttattgagcttggagcccaggggttttcccaccagacccttaaatgttctgtctgggaaagggaaacccagtccctgtgccagagtaggtgagaggcaattgcaaatccagaattcacatgtccccacagtgatgagctggctaggtcaagggaaggcagatcaaactaagttattaggttgagccacatctggaaataacatttttgtttgttttgcaagtcagtaatgttggcaacacctgggtggtggtggctcacaccttcaatcccagtgctcgggaggcagaagcagtcagatatttttcaaggccagcctggtctacaaagcaagttccagtacatccaccagggctacactgagaaaccctgtctcagccagtaatataatgttggcaattttacaggatccaattaatgtatatgggaagaaatatacaaatattaaacattattcagaagaacctgacctgaagaaataactataggactctaagaggagctgtacattttttgttgttcagtctctgttggaaataggatctgcagagcccagggtagctaaaacttggtacatggcagaggatgaccttgaaggcaatcctcttgctcctacctctcaagtgcctggattacagaggggcacctcctaccacaggaggagctcaagagctattcctataaaccttaattctgtgcaccaaattcatgtattacttggattaaaaataaaaattcagggctggagagatggctcagaggttaagagcagtagctgttcttcctgaggtcctgagttcaattcccaacaaccacatgggggctcacaaccatccgttatgagatctggtgccctcttctggtgtgcagatatacatggaagcacaatgttgtatacataatgaataaaatttttaaaaaataaataaataaaaattcaggccaggctggtagtacatatttgtaatcccagcattggaaggggaggctggagaattaggtttttgtttttgttttttttttctctccgagacagggtttctctgtgggttttagagactgtcctggaactctctttgaagaccaggctggcctcgaactcacagagactcacctgcctctgaggctggaggattaataaaagtttttttgttttactttgtttttcaaaacagggtctctgtgtagccctgcctgacctggaactctctcttttatgtagtctaggctggcctcaaattcacaagagataaccctgcctctgagtggggattaaaggcattacacctggctgactactgcatgttccaggtcagcgtgcgatagagtgagactgtgtttcaaaacaaaccccaaactaaatgtgacatacatttagcatcagcttgaaatcacatggctggcacattctgaccggataatgaaaacagggcttgtcctagagattctttctcttttttatagtttttaaaatttttcctttatgtttattttaccctacatttttgcctgcatgcacgtatgtgcaccatatgtgtgtctattgggattgttgaagattgtgagtcactatgaagcatactaggagttaagctcaggttgtctacaagagcagcaagtgttcttaactgctgaaccatctctccagcccctggggattctttaaaaacaaagaaaaagaacaagtctcagtctaatgacaagcatcagaccaacctaatttaggggacctgcccaatatcccttaagcctgtcaaggtcatgaaaaataaagacaagggatacagagcagaggacactagggagacacaaccaagtggtccactaggttggtcctggaagaaggcgtgactcccattcagttaatggtaatgtcctagggagggttcttactttaatagaggtcctgtgtaagatattcacaacacaggaaaacaatgaaaaatacaggacttctctctactatctctgcaaccttctatggttccaagttaattccacaataaaaggtttatctagagaaaccaaaacaaacaaaaatgtgctttttttttgttagggttttgcttgtttaggggttttgttgttcttgtttgttttgagacagggtctctgtatgtagccctagttgtcctggaactctctatgtagactaggctggcctcaaatcacagagatcttccagcctctgtctcctgactggtggttactaaaggtgtgcatcattccatctaacttgttttgttttgagacaggatctcttgaaacccatgctggccttgaactatgtagcagagagtccccttgaatttctgaatccacttctacgtcccatatgctgaggtcacaagtatgtgccactatatggttttatgtggcaagagggattgaatccagggctttttacatgctaagcaagaactctttaagagctatcttcccaccaggtaggtaatggtggtacacgcctttaattccagcactggaggcaaagggggggggggggtctgtgagtttaaggccagcctgggttacagaaaaagttcaagacagccaagactgctacacagagaaaccctgtctcaaaaaaaaaaaaaaaaaaaggaaagaaagaaaaagaaaacaatcagataagaagcggcagcagcaatattctcagtctgtttgtttctttgagatagggtctcaatatctagcccaggctggtttggaatttactatgtagccagctagaagaaggtagaagcaggaagatggagttcaaggtaatccttggtatcttagtaaagtttagaccagcctggtccacgtggattgttgtgagaacacaatgaacctcagaaacattggtgggcaagacacagtgaagaatactataattacagccctcaggaggcagaagcagaggcagagggatccttttaagttcaaggccagcctaggctaggctacccagggatacgtaaccttgatttcaaaccaaaaatggtaaaaggtagctttgacaaatacacatgtaagacccaaattttcaactatgttacctttgtgtcagtgaagtggaaataaactattcaataatgtaaaagctgacatctttctttctttctttcatttatttttttgatttttcgagatagggtttctctgtgtagctttggagcctatcctggcactcgctctggagaccaggctggcctcgaactcacagagatccgcctgcctctgcctctgcctcccgagtgctgggattaaaggcgtgagccaccaatgctgggcaaaagctgacatctttagcagaaaatgtactgatgtctgcatttcaacttgaaataaatgtaaaaataatccagggcgggctagtgagatggctgaggaggttaagcatccgctgccaagcctgatgacttgagtgacccccagaccccacgtgatggaaggagagaagtgactcctgaaagttgtcctctgacaacatgcaagctgggacatatgcatgatccacatccacaaacacaaaataatgtaaaataaaacaaacaaacaaaacaaccagggcctgttgctgaagcacctaggagatatccaggctgcatgagacactgatcaaaaaaaaaaaaaaaatagtaagtaaaaagccccaaataacagtaaaagaaaagatggcttacgggatgtattttgtaaccaagctagtacttcggaatgttactgatagggtttttgtagtgggtgaagtgaaataaatatgtgtcagtatttgcataacaaagtgtagaaaagggccatgctcatttggacacatagtgtttaatgtcctcacttatgagcaggtgccatgactacagggaaaggatagaaggctagctggagcttggccctttcagaggaaagcctgggcctgggactttccattaagactgcaagaagaagggatttcccagaggtcccaggattcaccctgctcaacagctgcaaacccacaggccctttgcctattctgagcaggggaaagttgagcaggaggtaacaaaagcatggataaattagtaactgacttcccattccttaaatttctttttccttatgtagaaatccagagccatcagctccagtttattatctgccatagtgatcttcactagtgcatacttagggttttggggcccaagaacgtgtctgtctctgccttcagagacctgtggcctgtttttggaagctgccctgcttgctgtcgctaatctcccagctctccctggcttgtatttccacactccccttagggttccttttatcccccaacacagccattttattgttgttgggttgtttttgtttggggacaaggtctccctatgtggctctggcttagaactcactaggtgaccagtttaccttaaattcacaaagaaccacctgcttctgcctccaagtgctaggattataggagagcaccaccacactgggcacctccacaggaacttattagaggggtgcagggctcagggagggggtggctcccttatctaacttcttggccccagaaggatctctttttgttgctttttcattttgagatggtctcactttatttatagcacaggctgcctggacctcaattatgtagaccagactggcttgaactcagtgtggtctactgcttcaagcacctggatgcccagactgcatgcagaagcctctgagctacggtgcctgcacacactgacagaagcctcgctctcccctgcccccataacaaccccatgctcagttatatgatcccaatgggatggcatctgctccaactctggagcctcagacctggcacagagctcattttccgagtgcatgtgttggtccttaggctcttggcactacccttcaggcatgacttgtgagacttcactcctttccttggcaatcataaaggcctcagggctgctcttctctgctctgtggtagacacttcataagttaatcagggtcacagtggacagaataaatcaaaaatgaaatgagacctaacatgcttcagagccaatgtgacagaagagagacaaagaagaacatcttctaagcacctggtcaggcctttaggaacttcacaactcccgggctggggcccatttataaaccaggatcacaccggtatgagaggctatatcatcagctctacctgtttacatccaaaaatcttcccaccacctacacttcttaggcttggcactggccaaggctagttgatcttccatgccctaacaagcacccgggggggggggggggggttgtgttccccacattacagctctgccactccaccagattctccttggaaaaggcaaagtaagtttgagacttcagagccaactggtcttgaccaatcagagcctcttgactccagcctccaggagacagatgtggtctccacccctaggcctcttccttctgttagagacaccgacactctcggggacttcaactggttgccatagttggcaaagtgctgcttccttggccacctgcctggagtctaggcaagtagaagccagaggaggctggcagctgactgtggagctctgacctacccactcaggccaaacagactctgcaagggaggagacagtaaacagtgcttcaccttccaactctaaagattcaaagcagcagggaaagggaaagtgatgtcactaacagacctgcaatccctgcacttgagagttggaaggaggatcagaaattcaagccattctcaagcactaagtacatttgaggccagcaggagctaccagaaagagatgctgtctcaaacaaacaaacaaacaaacaaacacaaagaaaaagtcaggaaaatcacaggacttcaagacagtgtcaccatgtaggactgtagactggtgccagagtagcaattgttatttacctggccctttcaattgtcaaaagcattcttgttcaacatcatactgaatccatggccaccttccaagtaaagaaaccaagagtacagcctctcaccagattacagcagccaccttctccacaccagggttccagctcgcaacctcttctcttcctggcagcatacagtgcacagtctaaatccaatcacatttatccttggttgaaaactaatggttcagcctgaacctcagcataatgaggtccccaagggctgtgtagtctaaccactgcaaccctggaatgttctcattcttcctcaggaagcacagtcagtactacacaaccactaatagcacacagaattacactctttcttgggtttccccttctctctttctccttctccctcctagtacccagctgaattctgtatgttcccccgcactgtatctagaaaccactttctccaagaagcattcacagtcctggctcccagccccacagtgaccccatcaccctgcttgccctgcttgtttattttgcattctctcccagactgtgggttccctgaaaggaaggctatgtctcattcatctaaagagctgtagagagcagtagttatgtatgtggagtatgatgagaactctctttcaggatttaaacaaataggaagctgcctcatatataagcaaaggaagattaccaagatgttttcttaaaagaaagtagaagattctctctctctctctctctctctctctctctctctctcttacttgtaaacttgtacatgatgcttgtaaacacatggagagtgcctcagaaagccaacctccaagcacacgatccagattacagggggtctccaatttgtaaaccttccttaagcattagccacatttatttataattgtaagtaagattccctgtgttctctgttcttacatttatttagggtgactgggatacttttcttttagaaaagacagattcgtgaagtgtgtgtgtgtgtgtgtgtgtgtgtgtgtgtgtgtgtgtgtgtgtgtgtacataaatcactgatagatttgttacacctataatcccagaatttgagaggtagaggcaggaagacaaggagttcaaggccagcttcagctacatagaaagctagaggtatggctgggtacatgagaccctgtccaaaaatttatataggaaagaaaaaaagagactgtctcttccttataatttatgaactgaatactgctccagaagtttgctgtgtatatcaacagagctcactattcacatttcacctgccagcatgtgactgatggcaaaaataagacccaggttatatcaaatcctttaaataccctatgaagtggaaattatcaccctgaaatctgagactagaaacaggaacctaaagaagttaaatcacctgctacaagtcactgtgagagagttggaggagacctcaagcaatcaaccagtagattccaatcttatctctcacattcaatcacatacacacaaaaacacacatgcctcattagatggtttactactgttatttcctgttactgactctgaggcaatggtaattaccaaatgatgtgtacttaccacatgatgaaaaatacctaatggtccccaagagagagaaccgagccttagtcactggagtacatgctgggataactaatagtctacacatattcattctgtaataggacgagatacttttcaatatgaacagagcaggactttaacaaaactcagtaagtcaagttgttctatgtagtctatatagataaaactgattttgacaatgaaggtctgggttctggtcacccatctggaatttgtggccatttggcacacagaaaagctcttatctgcctgtaccagggagagaaggaggaggctagaggaaaatacctttccctgctagaaaggtatttataaaaacaggctgtggaatgagcatatgttcccaaatgcctgatatcttaatagaaatgccagcacacaagaaggactaggcttggctgtgcaggacatgaagaggccagatttggatggaaggaaaggatggagacagtgctaactgacctcagtcagatgtgtgacttcacctccatctttgcttccccccccaccttcacatcctcttcctgtcctcctcacctcttccctccctgaggcgtatcttaccacttaaaatctactctaaaagcactgctatactcatatgaaccatgtgaaaaaataaaaaaggactctttcattataagtaccaaattaaccagaagcaccctcaaatcccaacagcaaaggattacctggtcaaacaaatcacagtgcctcccacccaaggaacatgatggggccactacaaacattcatctcaagaggctgaggatggagcccagtgggcagagtgcttgtttagtatgcatgaaacctcagttcagtcctcagcatgacataaaaatcggcacatgcctgtaattctgacattcaagaggtagatcaagaaggtagtttaaggtcatcttcaagcacatagagagtttgaagccagtcttggctacatgaaagcctgttagattggtttgtttttaaagatttatttatttattatgtatactatgttctgtctgcatgtatgcctgcacaccagaagagggcaccacatcccattacagatggttgtgagccaccatgtggttgctgggaattgaactcacaacctctggaagaacagccatccttgattgttttgctttgttcatttaaattagaaacaaactccttttacatgctaatctcagttccctcttcctcccctcctcccctgccccaactgacaccctatcccaactcatttcggctccccagggagggtgaggccttccatgggggatcttcaaagtctgtcatatcatttggagcagggcctagaccctccccagtgtatgtatctctctatgtggaatgggctcccaaagttcatttgcacactaggggtaaatagtgatccaccaccagtgaccccatagattgtccagtcctccaaactgacctccttgttcagggggtctggaacagtcctatgctggtttcccagctatcagtctggggtccatgagcaaccccttgttcaggtcagctgtttctgtgggtttctccagcctggtacttgattggttttttgtttttgttttgttttgtttttcgagatagggtttctctgaattattttggagcctgtcctggaactctgtagaccaggctggccttaactcacagagatccgcctgcctctgcctcccgagtactgggattaaaggcatgtgccaccaacgcccagcccttgattggtttttttaagttacttttattattttatgtgtatgggcatctgggtattttgcctatatgtatggtgtctgcataagtcagacaagggcatcatatcccctggaactggagttagagacaattctgggtgctggtaatcaaaccctagtcttttgtaagagcaaccagtgcttttaactgctgagctgagccatctcccctatactctgcttgtttggattttgttggttgtttggctttatttgtttgtttgtttgagacagggtgtctctgtgccctggctggactagaactggctttgtagaccatgttggcctcaaaaattagagatctgcctgcctctgtctcccaagtgcatgctctaccaccaccaagcaggattcttttcttttttccttttttctttctttctttttttttttttttttttttttttttttttttttttttggttgttgttgtcttttgagatagtatttctctatgtctgtatgtaataactttggctgtcctggaactggctttgtagagtaggctaggctggcttcaaatttacagagatccacctgcctctgcctcctgagtgctgggattaaaggcattcactaccacacccaagttttgttgttgttgtttgttttgagacagagtcttactgtgtagctttacctgtcctggaacttatagaccaggctagctttgaacgcacagagatttatctatctccgcctcgaaagtgctgggattaaaggtgtatgccaacacacctagtaagactcagtttgaaaaaaaaaattgttttaattttatctcaaggtgagtatctcaaggtgaaagcaccaagtctgagagcagtttgtagattaggatgtttttgactcaaacacacaaatgtccttatgtacatgtcctcatagccacctgttaatgtatcagcctaaaagacacaaaccagactaaacagaggaccaaatgaccattgctagtgctggagcacacccaggggtcttaagaatgctagataaactatctgtggtggtgcatgttgttaatcccagaatttgagaggcagaggctggaggatctctttgagtttgaggccagctgttccaggacagccagaggtacacagagaaatcctatcttgagataccaaaaaaaagaaaggaaggaaggaaggaaggaaggaaggaaggaaggaaatgctagataaagatgggtatggtggcacgcacctgtaatcctagcatttgggaggctaaggcagaaggatctccaagagctggaggctaccacaggctgtattatacagtaatgcaagccagcctaagaaggggacacacactgtctccaaaaaagggtagaggatagctcaattggtaaagtgcaagcataagaacctgagttcaatccctagtaactatattaaaaaaccatgtggagcaactctaatcacagtactgggagggcaaagacaggatccctagagcttgttgggtagcccgtctggctgaactggcaagtgccagccaggttcacggagagacaatgtctcagaaaataaagtgaacgggaactgaagaagacacccagcatcaatttctggtctccccacccacaagcatacatatacacactctccctgcataaaagcaaagattactaggccaatactatacactgagtacattctcagatcctactagagacttctatttgttgtttgttcttgtttctgtttgttttgagatggctttaccaggccaggaaagccttgaactacacaggcaaggctggcattgaattcctgcttccacctcctcagggctgtaaattaaagccgtgtgctaccacacccaccctcagatctcctcactggggatttaacctagggcttgaagcatgctaattaagcatatgactgctaagctacagtcctaatattggaactttacttttcattcaacattctttcacttcttttccatgacaacaataaattcatttattgcttatgtgattaaaatgtattcaaaatgtttttaaagggtaagaaatgggagctacaaagatagcccttcagttaaaagcactggctactctttcaggactcagtttcaattcagcactctcatggtagattataacatctataactccaattaaaagtctatacccttttttcacctccataagtaccaggaacacacatagtatacacacatagtatacacacaggaaggcaaaacactcaaacacataaaataaaaagaaaaaaataagagatatgaaatgatggcgctggggagatacctcaaccaataaagtacttcacatgcaagcatgaaaacataagtttgatttccagcatccacataaaaagctagacatggctgggcagtgtggcacatgcctttaatcccagcactcgggaagcagaggcaggcggatctctgtgagttcgagaccagcctggtctacaagagctagttccaggacagcctccaaaagccacagagaaaccctgtctgggaaaaaaaaaaaaaaaaaaaaaaaaaagcagctagacagagctggagagacagaggatccatgggactggccagcttaggctaaattggcaagcccaagtgctagtgagagacctttctcaaaacacaaggttggtgggagggctgcagaaatggctcaggagttaagagtgctttgtactctttcagagaccaaagtttgggtcccaggagacacacttggtggctcactaccacctgtaactacagctccaagaaatctgatgctctgttctgacctcctaaagcaagcatgcacacaaacagtaataataaaagaatttaaaaagaaaaaaacacaacaacattttgtttgtttttgtttttggagacagggtttctccgtaggtttggagactgtcctggaactctctttgaagaccaggctggcctcgaactcacagatctccacctgcctctacctcctgagtgctgggattaaaggcgtgcaccacctgcaccaccaccaccaccaccaccaccacccagcaaaaaacaaaacaaaaaacaaaaaacaaaacaaaaaaaaaaacccaacttttaaaggtaagaaatgatgccaagaacttggctattctctgtagttcaactaccaatatactggatcctactgcctttgatctgtagttcaacccagcccctcttttccaataattaagtttctcttgcttttgatggcacctgatgagttgcacacagccccctggtattaagagaccttcctttcatacaggcagcatcccacagatgcctcataaacattgccaatttcattaactgagcaaaattagagtcaagacaacaggctgagggctatttctttggagtttgccaacctccgtataggccaaggtaggtccaagaccatcacatccaagtcctgggatacatgcaaaagaaagggactctgaaaacagaagtgccaggatggctgggatacatgcaaaagaaaggggctctggtaagcagaagtgccaggatgaccttttggcttattttagacactacagtgaatcctgtagatttctgcccttgtaggacatactcattcaccgtcagaaactgccactagggctgtttcatgctagaaacagccttttgctgttcatataccaaaggtggatgggttggatgaaaatcctccagtaacattcacacaagaaacaccagtcccaccagttcactagcaaaagcttaaacttctccccaaacttctaaccctggagacaagaagctcctgggcctattctctgacaccattagtcttttcaaacagctccacttctaagccatccactattcagggaaatgcctggctaccaagggcattaaagtgaccaacagtataaatgatctttcaagacctcaacaatgagggcagtctgccatgaaagaacatggcagattgaacgagagaacttcaggaaagatggatgattccacaaagggctttccagacctctaagagagctagctaaaagtataaacctcaaactttgtttttcatgttgaaccaagatctttaggaatgagccttagaaatctgtttaaggggggctggagagatggctcagaggttaagagcactggctgctcttccagaggtcctgagttcaattcccagcaactacatggtggctcacaaccatctataataaagtctggcaccctttctagcatgaaagtgtacatgcaagcagaatattatatatatgataaataaataaaatatgttaaaaaaaaaagaaatccgtttaagaataaaacaataggggcttggggctggagagaaggctcagtggcaaagaaccctggctgctcttcctggacctggttcagttcccagtatctacatgatggctcacaactgtctgtgactccagttctaggggatagtagaaactcaggaggttggtcagaaggatcagaagatcaaggtcattgttggctacatagtaactttgaagccagactgggctatgtaagacagctaccgttcacccaacagtccatccatggcattcccaaactccctgcctttgcttctactgtcctcaaaacccacctttgacccactcagcatacttcatttgatagtgccaacaaggctcaattttacaagtacactgcttttcaagttgggcctgactgaatttgtttcttgactccactgaccatgagtgaagagcctcagtaaactatttgtaaactatggatagcactttctctagatttgttgtaaggattcaatgaagcaacactcagcatggcactcaacacatgatcagtgttgggaggtagaagcaggggcatcaggggctcaaagttatcaacaaaagattcagttttacacaattcactcccctatccctttctcccaagtgagctcaatgacagatgagctctccccgctgcataattcaaaactagaggatgggaaccagggtctcaaccgacagcccgaggctcaaaatgaacccctgaccctgtgctaccctcaactctcacctgcccaacgttgaaggtcagtgtgatggcgtaaaagaaattggagttggcacttcctgcataaatccagagatgccacaggacagggaagagaagagagcagacgacgatgatgcaggtgagtacgaaaacgttccgtaggactgaaaaacagatggtcagttagtcccgcactcttcctctggccccctctttttgctgtggtagcctcacaggacagggagcaggtcatatggctcaaaggcagagcactcctacaaatattgtgttgggaggcaaacctcagaccctggtcaatggctccccatgcccataactgctgggaatctacatttggagactttcctcatcacttccacagccatgatgtctcatggatgagaatgggacctgaaccggcatgatgagagttccacagtgggggtctgcatgatgccatgcccacacagggtaaaaatgcactgtctcacgtgcttgtattgctctttaaatgaccctcttcactcttccacagacaacttacaaatctatctccctttccatcctcccagaccaagatctcctatagcacagcctggcctcaaactaagtaaagataactttgagcccctgatgcccctgcttctacctcccaaatgttgggtgcaggccataacaggccatattttaaaattatatatacgatcattttgtttgcatacaggtctgtgtaccatgtgtgtgcctggtgcccaggaaagtcaacagacagttcaattccctggaactggggttatgaacagttgtgatttgccatgtgggtgctgtaaactgaacaagtgctcttaagcacagagtcatctctccagcccacaacccccttttcaatgcccttctttcttacattacaccttgctccagaaggaaggctgagaccctataggggggagcactataccagagcttggacaggcaggcagagtttagtttagattagggcacagatggtggccacacaaagagttgactttaagggagagatgagtgaatatcctactctggcaagcaaagtgtgatggcccatgcctataattccagtacacaggaagttggggacaggggaaagaggagttgtttgaggacagctttggttacaaaccctatgtcaaaacaaaacaaaaaacaaaatcaccaccacaaaaattcatcagtctttaggttctgtaagtcttagctacctcatctctaaaatggggctaaaatgcctgttatgtgaatcacatgagactttgtgcaaaagtcagatttgttgacaaatacctggtcttacagcaccggagggagaatggctacataagtaagaaacttataaccgtctcaaaacacaaatcaccaacagcaaaagggtatgaaaaaaaaacaaaactggacattgtatttattactatgtgagttttctattgctatagccaatttccataacagcattttaaaaaatataatttaccactacccatttcttaggtcagaagtccaaaatgggtcttctgggccacactcaaggtctgggcagaactgtgttccttctggattctcttggggagaatctacatgcttgccttttccagcttgttggggcctggagtctttagctcataatccccttacagcttctggcactgggagacccaatccatcttagaggttaccattcttgcctcttccatgccttggttatccgctgttctgtttagaagactttgttagatttgttagagcagttttaagttcacagatagctgagttggagatacagttttcatactctccggcctccacctttcttctttgagatatccttatacttatactgcacctgcaatcattactgtagagtcccttttgctataaaagggaacaaattcactggttctgaaattagtgatatggacattgttgggagtgatgaggaagggaattattctgctgaccacaggtactcagtttgttttcttttgatagtcatctctgacagtagaagatgtcactgttaattctctttctactttattgtattttaatgtacatattttaaattaagtaatttaaacaacataagatataatcatctgcactgggcctggtccccagcaggaactcagtgaagtgttgttcctactacttctctgatgcagactcacaggaaaccagttttctttccttttctttttttaggataaggtcttacattgtagccctgaatagcctgtctctgactgggattgaaccagagatcagcctgcctctgcctttcaagtgctgggattaatggtgtgtaccatcatgcccagaaaattggagatttacaaaatgaggcactcacggtcactctcagttctaccatcactggactgatacactggaaggggactggataacagataattctctgttctagctgcaaataacaggggagtcccactagagtctagggtacagcctacacagaggttttgtaagtttcctgggtaactgaatatggactctgacagtctgccatagaatcaccactaatgtgtggactaatagaacaaagtagtttgaggttatttttacataattttttaaggtttatttatttattatgtatatagtgttctgcctgcatgtattcctgcataccagaagagggtgccagatctcattacagatggttgtgagccaccatgtggttgctgggaattgaactcaggacctttcgaagagcaaacagtgctcttaacctctgagccatctcttagccccactgaggttattattggtttttttttttttaatttttcgagacaggatttctttgtgtagccctagctgttctggaactatctcttgtagaccaggctggccttgaaatcacagagatccacctgactctgcctctgtagtgctgggactaaaggtgtctgccgcggtcgccgccgccaccgccactaccacctggctcactgaggttatttttaaagctgtgttggcaacatatagttcactaattttgtttggctgattttgttttttgaagcagggactcataaagttcaggctagccttacttgatatgtagcctaggatagcatggccttaaaactcctaatcctcctgcctccaccttccaaatatcatgcccagctacagttcattctttgtaaagaaggataagaatccttcttttgttattatcatttaaaaagccactttagccgggtgtggcaatgcacccttttagccccagcactcaggaagcagaggcaggcagaactctgagagtttgaggccagcctggtctacacagtgagttccaggacagccagagctacacagaagaacccagtctcaaaacaacacaagtcatttaaaatggggacaatattggtagctgtttcatccaccaccaaaataaaaagctttaaaaaaatttctttctttttttaaaaaattttatttatttattatgtatacaaccttctgcttccatgtgtatctgcacactagaagagggcaccagctctcataacggattgttgtgagccaccatgtggttgctgagaattgaactcaggacctctggaaaagcagtcagtgctcttaacctctgagccatctctccagcccaaaaaacatttttcaaatgttagtggtgtaggaaatcccttaatttggacactagcctggaggcctgaaaggaatcagaaaaggttgccttttctgatctgatatttccattgtcctggacggtcaacactgaagggccaaagtcctggttcagctctcctgagacctgccagggagcctgggcctcttgctctctctcagggtagggagcccaggaaaagctatgtttacactgttatcacattgttatcatcaagcagcattccaaactgaagaaaggagaacagagctgcttactcccccactgtatttcagttctcagtggttctttctcatcctctataaatatcttggctgaaaagaacatgtattattactagaataaaactttgcagggcctggtagcccaagtggctcctggttctgtgactcaggcagagacagaggctctaaagggtgaaaggaaagagactgagtacaaaatgaaagaggctacgaatgtagcctctgggctgcaaagagacttcaatgtgcttggaaaaccttcactagcatccagctggattcaggccagtggtgacctttgcagggacagggagctgctactcactcttgctggctggaaggctgggagattaaagctctatgccagagcagatgggactggggaggacctgaggcacagacaggacagcttgttccaggcaccaagaggtgtcagagatgaccaaggcctacacctttcatcagacctgctaggtcagatggagtcaagttccccagacattcactggatggcttatccaatctgtggcaccacactgaaaaacagaaacttctgactaggcccttttcccttgagcctcaggcgttcagaaaaaaaatatcacttaaaatctctggtctcatcaggagggtcacagagggaactaaggggcttcaaaggttaaagagatgtttcttttcttaaattaaatgctagatacatgagaacttacagtatataatgcttataatttatttgtattttaatcaacattcttttacctttacacaatagttaatttaaaaaacaaaaagaaatacagcatatgttcaactccagtctcgtggtagctggctttgcatttggggcattgcagctggcaccagctcggccagcaggctgttctctaacaccacaagtatgcatctgcctgactcatcctgacccaaggctacagaagccagtgactgacatttattcatttatttggtgctgttgtttgttgtttttatcaaaacaaggtttctctgtgtagccctggctatcctggaacttgatctgcagactaggctggccttgaactcagagatctacctgaccctgcctcccaagttctggtgtgattgagcattatacccaaggaagggcctattcttttcttccccactgatcaatataagaaaacagatgaggtgggagcagggagatcaatactggcagcaggtgtttcaaaatgggacatcctataacattaactatattcaactaggaggaaagacttctcaaaatctgagtagacagaaatcagaggtcccaaggcctaggactaaagacatttacaagtgattataataactcatagatgacaagtcccaaacatgagaagtccctatacagtgcaaagtatggcagccactactttccgaagagctttagacaagccatgcccttgcccagtcagtcaatagcagcctctacttatagagtctctactaatagagtctattagatcacccagggttctggaaaccccctcttccttctctgtctcatcatccctgtaggcataaaacaatttattttaagttttaaaaaaacatatatttatttcaatgtctctggatgctaagtctgaagctttaatggtggaaatatgcaggtgatgaccctggttaattattgatgacaagtgcagtactattcatatatttcctttctcaaaattaaaaagatattcatgaaagatactttattttgaaagagaagtctccctatgtggctctggctaaactcaaacttgctatcctcatgcctcagccttttaagtgttggggttaaggacccacaccaggatactctcttcatctggtggatggaaaaggaaaagccagaggctcagaaaggctaaagcagccgcccagaaagtcgggaggcaggctgaagctctagtcagtctataaacagaatcagcaatgtgagattactgcatattgcccctgagaagggacaacactctgtgtaggacagacggctaaggaaaacaacctgcctcagagagagcaagaccagtgcctgaagcttttccttcccacagaccaaggcatgtccacatattctgattgcctcatgattcatcactgggtgattcttgtctgtgaaacgaggatgtcacaagcagaagatgatgctacctccctcagtcagctcagatttgtcaccattccaccaggcccaagcgtcacacctggcctgggcttgtcctacccacttagctgtttacctttactctggggcctacacttacagataggtttcctacttgcagctggtcagtttcacttcctggttgacacccagacaaccccaaaactaacttcctctgaagcttgtacttggagttcatttctgacacagctcccttcccactggaagacagagaatcaggaggataactgggctctgcttccttcaaagggagccttcaaaagcccttctacaggcattcgctaatagttttgtgtcagaatccatggtgggtgctggaaacactgaggcaaaagatatcgccagaagggagcctttagacacagaacagaactaccaagagggatggggggaatatgagcccaaatttgggaaacattgggggcttaagtaacacagaacatttctgagccatattataagagataggtagaattgaggggtctttataggaagtctggttttcaaaacccaaggttacagttgccacttgtccaataggaaacttggccattgtccaataggaagcctggccatatgtagcatcctacatttgaatttaaataaaaacatcagtttctgctggcaccatgactcactctatattctcagtatttaggaagctaagacaggatgactgcttctaaattgagggcagcctgggttacatagtgagcttcaggttagccagggctacagcctaggctgtgtgacaaacaaatgacaacaaacaacaaaatctgtgcataacagtacacctctgtaatcccagatttgagaggtacaggcaggaggaacgggagttcaaggccatcttcagttacatagtaaacacaaggccaatttgggctttatgagaccctatttcaaaaagctgggagtaggagagaaaaacaagaaaaaatttagtctctatattagtagccactgggtatggtcctcattagagaaatcaggctggacagcactgggcaaggctctaagagccaggcttcaatcccagtgtttcacagcagtcacagggccttcaacaagtagctctccctttctgtgcctgttttctcatctgtacctcaagggatgatgcaaagagcaaatgagctaatgactgacaatggtctgtaaatggtagttaatgagctaatgactgacaatgtcaggcgcagtctgtaaatggtagttatctgtgtttccagcactgctcacagcccaggaggcacacgggcacatgcatgtaggttgcctcctctttctcagtgctgcagcacaacaggtgcccagtaaatgctcattaactcccttctcccagctgtttcgcccaagagttagatggactggaatctattttgtgaagagagtcagactactcacatctgtagagatgattccacacagggaagaaagccatgtagagggccacatctcccaccgttggataggacttgaagatagagatgatggcaatctggatgaacatgaagaagatggggtgctccctggagcagggccgggaagacaaacatgcagagagattagccagggaccagtcccactcttagagactcctgacccaccaggccccagtagcacagcagcaaactgcagagatcaagaaattcccagaagtggcaaggaagaacagacaaacaccagtgatacagtttgcaggacactgcccatcaatagccacttcctgtctactagctctgggcctggtccccagaaaccaaatcaagaaagcaaattaagtcagctttccttattagtagcctaaatgactgcttgtcagagaaatcaggcagcctctcccagcaaaggcccttgtcaacaggtccaaaacaggaagtgcctgctggctgatggcttgctcactgaaaatgtggtcagagcaacatgtagacccttactgttaagaccgaggactgaacgttacatgcagcattgctagctcctcaggggccaagaattctctcttttgtgttttagagataggatctcatgtagcacaggctggcctccaactcactatatagttgagaccagccctggacttatgattttcttgcctctactttctaggtgctaggattacaggcaactaccatgtctgtctcagagtggaatttttgggagcttaaactagtaacagctgaactgattttaaattaataaactgccatggctcccatctcctttctttctatactgagttctgtgcagtttctcctgtatcatctcagacgatcctcacagcacctcagccagccctccaggcagagattcctgttccctgtccttcccaggtaaggaaactgaaattcagagaaatgaagtcagtggtatagctgtatgtctacagagctcctgataccactatgttcctctccttggtgcttcacatgtcttgcagcaccagtaaggaggtgggggggcatgcctcgtcctaaagcggcccctctgagaacaccaagagctgaagggaagtgaataggaaaaagccagttacggatccctctcaataaccctcagcacaagcacagggaagactctgcacagagctgatgcctgcttataaggcctttggtcaggggctccgaagccagggtaatggagccacttctgggactactgcaagtgctctcctcagaacttggcacagtccaagtagatgagcagattctggagtcagacaaacctgtgcctgaaccccagctccactgcttgctatctgtgtagctcaagaagaactgttcatctctctgagcaacaatttatcaactataaaactgaatgatggaagtgaaataatgctggccttcaagttgctgagtttgctatcaacccatctcacagcgctatataggtacctgggaagaagcaggctccacaatgacagctcttacactgtagaagtgaactacacagaaagccccatttgaggaaaagtgatcaaagatcaaacagggctgtacatgcccagtctccaaaataacccaattggaatcctttggataaatcataattgagctgttgatcaagaacatccaaccagacccactttccccaaagacatcctcagtgtaacctttgttcttgccgaaatggtgagcagactaaaatgtggccccaggcacctccaggtgagaccagggggaaaccagggctccgaagcatcctccctgcagcctgtacttgtgtgtgaatctcaactgctgaccctggatactggcacatgacaaaaaagtcaaaagcctgatggcaggtggtaccagtccaaaggatagctcaggcaggccacaggagggagggtggacaaataaacagcaggtcctcacacttactttaatttgatggctaaggggactgtgtagaagaagacgttgatctgaaacacgcagacaaaaaagaggctgaagtgctcaaacatctctgcaaagaagtaccagaaaagcccgatgtttggagtgagatctggaacagaaagtctggaattaagaaaacacaaggagagaaaagagaagagttacaaatggtttgctttgccctgcttttcccaagatttgaggtcactactaggcaaccaaggatggcattatccatctaaaggtcacagtagtataaagagctctctatatacctccatacagacaatttacaaaatatagggctgaagatgcccagaatagaagctataatacatactagctcaggactggggatacagctgagttggtagagtgcttgcctagagtgcacaggcccgggcttctacccccaggactgcattaagcccaaatgtaaaaacaggaggatcaaaagtttaaaatcattcttgattagatattgagctcaaggctagaacaggtgacatgagggaataaaaccaaaccccaaaacaagcaaaacaagcaaaaaaaccagctaagctaaaagaatctgaaatgaaaaagggagttccaggacagccaaggctgcacaaagaaaccctgtctcagaaaaacaaaacaaaacaacaataacaacaacaaaaaccccaccaaaacaacaacaacaacaaaagaaatcaagagagcagccctgcttttctacatcaggccagtttacaatcaggagctactcagtattgctagaggaaggagacttaaataaacaaaatctattttgggcattccaaagacttgcccagaggaacaagctccgagagcctgctcctcccagttcttgctccacatccccacagcaggagccagaagactgcatgcctgagcctgcaactgacttttccaagggcttcaggagccatcagcaggttgtgcaaatattcctaggactacagaactcatctgaaaattttgagtttatctaggagacctctgtatagttaaatagcataagaactggctgcaatactggctctttcaaaagctacctatgtgtacacatactctctctctctctctctctctctctctctctctctctctcttggttttgtctttgtttttcagagctgggatggaactcaggacttccacaatgctagaaaggcactctaccactgggctacatcctgagctgtgtgtgtgtttgtgtttgtgtgtctttcaaatgatgaagacagcaaggggcactaggccggcagtgacaagagtattaactgctgcccctaccatattttttatttgaaaaagagcaatgttgaaattaatttgtttataattttattatttttatgttattgggttttttgtttatttgttttgtttttttgtcttttttgagacagggtctcactatgtacccttggctggcctgaaactcactatgtagaccaggctgtacttgaactcacagagatgcctgcctgtgcttcccacgtgctacaattaagggcatatgccaccatacctgtctccaattcataatttaaaaagggcaagtaccttactcatttggtcatcttacaagcctcagaagtgtaatcaaaggtgtaaaagagcagaggtctcaaactttgttccctgttctaccctagtgccaggaatactagagagattaaatttttgatctctatctcatacctattgaattagagcccctagggatgggccagcactctggatttcagaagctgaggagtcttaaaacctgaggacccctgctgtagactgcctgcatagtcttctccctcttactccactaggagctgcaaaaacccaattagcagccgggctttggtgacgcaggcctttaatcccagcacttgggaggcagaggcaggcggatctctgtgagtttgagaccatcctggtctacaagagctagttccaggacagcctccaaagccacagagaagccctgtctcgaaaaacaaaaacaaacaaacaaacaaacaaaaccaaacaaacaaacaaacaaaaaatagcttccaggaatctcttatgaagtttgtactgtagggagagatctgaccacgaccacttgggcgtggtcacaagtatgtagaaggcatgtggaataaagagttgaggagaaggggactccctctcttttcggggttctggttggatctcagaggactgtggaaactagagcacggagcaccaatcgggttatcagtattgcatgtgagagattttaataaattgagcatctatatccatatcccattaacactgtacttacatgaatccatagaccgcagggatgaaatcccaagagctgagaaggaagaaggagaggcaaactatcaccacaaggcttcctatatacatcatggcatactcccaagagaagatccagaaggctttgctcttcactttcacagggatgtactgccgctaggagagaggccagaataggacatttagggacaccaaggacaaaaaacacctctcagcttatacataaagatccctcctataaaaatcaagccatggcacataggtttacaattttgctgtttccttcctttctttctgttttttttgttttttcgagacagggtttctctatacagccctgactgtctggaaatagctctgtaaatcaaggctggcctctaactcacagagatccgcctgcttctgcctccaaagtgctgggactaaggatgtatgttgcccctgccaccactcagccctgatacttttcttatatcagaaaaaaaatacaaatgttttgaaaaaaggtattaagaatggatgagacctcctatcactattccaggtgtgcattctggagatgtgcacaaaataccaatgagaagataatcactgaaccaggaagaaagcatggactgtggagcaacgggacaatggcatgctagcaatgacatgtaaactgcacctatgtatgtccacatagctaagtctcaacattcgagggtatagcacaaacttgccaaataatcgatagaaaataataacattcatgctatcttgaaattacacccaacaatattatgtattatttatacatatgtaggactttaagcataaaaattttatgaagcatattagaaggacatacattggccagcaagatggcttggtggttaagagcacttgcaccacacctgctagcttgagtttaatccctgagatccacatggtggaaaagagaaccaaatcctacaagatgtccactgacaatctcatatgcactgtggcatacgtgtgccatcaccacaaaaaatacattaaggccagcctggtctacatatcaagttccaagccagccagagatacacaatgataacttatccctgttcttcccataaaaagcaagtatgaaataaaatggtaataaaaaatctttctttctttttacttcgagaccctgtttaaaaataactggtgggaggggttaatatttctctgcctttcacaagaaagaaaaactaaaaatcaaacaacatatcaaaaggtgtgtattgaggctcacacctgtgaactctcagtgttacagagtctggggtaaaaggattcccaagaattcaagactagccctggctacattgttgtgtgatattttgattgtgttctgacaaagtttgcttggagtcagagggcagagctaccacgagctgaccgtagaggcctggaggactgtagatggggagacataagtagggaagcagggcagagagaagatctcagcccctttgcatggaggaactgaagatataggaaataactggtggctgctccttgttctctgatctttcaggttcttaccccaatatttgacttttgattctttattgataaagagtaaattagattaatgcttcacctggcatccacaaattcacaagacagccactagcccctggctttgaaaccattggcaaccaatggagctgtacacgcaggagcctctgtgccaccagctggcttttcctttctttctccaagtcctctaagctagtctgggattttcctgttgcagcctctttacagaaatctccacaagccccagactctacaggcgcctgcactccaaataccactgctggagttagtccttcataaccagtcagctctgccttcatgcagttccctccacaagtgatccttctgcacaatcccatgtgtgtttttcagacagccagctccctttcgatgtggactgcaggcttccccaggacctgctcctcaggctgctgcaacactaggtagcagccttcacatcactcaagcttctattattgttgcaaccgccacacactctcagctcacagctaaaggtgagcagctgcagctgctctcagccaagctgtgcaccacctgttttgtctgcccagatgtgctatgcagtgacagccagcctcatacttcactgtcatcatcatcagagctggtgagacacctgggaattattaaaggggagaattagtttaaaaggaaggaagcaaggaaggaaggaaggatggaaggaaggaaggaaggaagggagaaagagagaaagaggtgttttttttttttttaccacattgaaaaatgggaaacactattacaaacagagggagttaggtctctgtatgattctgaaatggacagtttaattagccgggcggtggttgcgcacacctttaatcccagcactgtgggaggcagaggcaggtggatctctgtgagttcgagaccagcctggtctacgagagctagttccaggacagtctccaaagccacagagaaaccccgccttaaaaaacaaaacaaacaacaacaacaacaacaataataataataataggaacaattaatgagggtttaattaacttagctgtgatttacataatgttaattataaacattatgggtttggtaattcttattttatccctaaaaaagttgcttgatatgagtgccaagatacagaccttagaaaaggttactaaagaaaataatgtaattttgactgataaattacaagccttagaaaaacttaataaaacagatagagatattcagacaaagaaaggaatttaaaggctaactaacctcaccatgacattataaaattagaggaacagcctaaggttataaaaaaaaaaaaagccaaccttaatttatctagtaactatacaggaacaactgccaaatgacagatatccccaagactaaggaagagctgactggattcctatgtaaatgttagatttgaggagatttaaggacttgatagtctcatgtgctacgcattcaccttttgtgaggcagatgtgaaattcatggtcaactagtaacagaattatcccacacaattttcttagaaagacttggttatagcagtatcagaacctggtcttcaactgcagtggaggacctggagaaaagatgaggctaggacctttgaacaacaaagtagggctagaggtatggaaatttcccaagcccaacttcctggagagggcaactatgctgacgtgtaaagacggtctatatctgatgaccatgccttggctctatgctgtacagcagccttgaatgcttgaggcagagttgaagaagtaagaaagagaactgagtcatttactaaagttacacagggcccaaaagaaaccttcattgatttttcacagagattgacttcagcagtaagtagaatgataccaaactcagaacctagacaaataataattgaatctttggcttttgaaaatgctaattcacaatgtaaaagggtaattaggcctttaaaggcaagatcaggacccacagaggaatggatccaagatacaatcaatattgaatctcataaccatgatgatgtttggataggagaggtgatttccgaggcttggaaaaaaaaatcaaaatgtcaagtgttttgtttttgtttttttgttaatttttgttgggggggggagttttgagacagggtttctctgtggctttggaggctgtcctggaactatctcttgtagaccaggctggtcttgaactcagagatgcgcgtgcctcagcctcccgagtggtgggattaaaggcgttcgttacctccgcctggcatcaggtgttttaattgtggcaaacaaggtattctaaaaagagactgtaggcagggtgttcctaggaacaatgttttttctaggaataatcaaaacacaagacccctaccttctggagtatgcagaaagtgtggcaaaggacattagaccaatgaatgtagatcaacaagggacagaaaaggaaaccctttgccatcaggaaaacacctggagggggggctactctcataggcctctatgtcaaatttggttcaattgttgcctgtcaattaaaggacctactgtaaaaaaaaccatactacacggggtgatagaacagctttaaaagataaaacaaaacttttagaaccataaagcaaataccataaacactagatttgaacaagagagacctcttgattagaaaaggtgatagttcatcaaacaatatgactactcaatctaaaataatttaaagatttgtatatttattatgtatacagagttctgctagcatgtcagaagaaggcaccaaatcactttacagatggttgtgagccaccatgtgattgctgggaattgaactcaggacctatggaagaggaatcagtactcttaacctctaggtcatctctccagccctctatctaaaataacttaaagactaacaaatgtttttaatttaatcagatataacttgccaagtgggaaactcccaaagttagggttggagcagagttttgtttttgtctttccaggagaataaaggcatccaactaaggaatctgaagacctggaaaaataatacatctggagaaaaaggacaaatcatccagagaaaatatcccaaggaaaagagtaaacgggccatttccaacaggataaaatttcatgtatcttcccaaatgtttgtttcttctgttctctacagatatataatgcagatggtatttttgttgttgttgttgttttgagacagggtttccctgtggctttggaggctgtcctggaactagctcttgtagatcaggctggtcttgaactcacagagatccacctgcctctgcctcccaagtgctgggattaaaggtgtgtcctaccacccgcctggctgcagatggtagttttatagtccctgtttaattaaaaattaagcaagctttggagttggagatcatttctccttctctaaacccaagcatgcttgttaaagtaaaatccaaaatctctgtttcatgtcagaagagccacctgatatgggacagaagaaaaaccaaaattaaggactattctattgccactaaacaatcctttggtattattttgactccttaaaacttttcttaggatataaatatctcaaattttataaaatttgtatacatatatgtttttaaatttcctgttatgatattaatggtcatacagagtactaactaattatagaaaaaggcttcatctagcttccagttcatgattttgggtttgagtctctatcagataactaggaattaagcttttgtactctggatgtacataataaattatggtactttaaccttttcaagatctgctgtatattatatttaaaatgtttaagttttctgcagtgaatcatgaccatgcttaacagcaacctttgaagtctccaaaaggagaatgaggccctacaatgacaatcccaccaggactatgataacctcactaaactgacaaacatcacctaaagaatgactttggactacaaactgttcaggacaattttaaggtggctagctgagatgatccagcctcacagactactatacctaggacttgagataagtctgcatttccccatttcacagagactgagcaacaaatgatacacttagctctcccaggacttgacaattatcctaatttttttcagggtcccctaaagatactgtcacccccagagagcaggaagtaattttaagaacatgacaaccacattcccaagaggtggggtgggcagtttttgggtggattatggatatttgtcattatttagcagtattggttacacattgctattggtagtagtcaagaaaaaggagacaaagaagatatttatatcctaacaaaggagattagttagactcagggatcttgttctgaaaagaaaaagcagtgatatagaaaggataggataaaagagtagattattttaaaccaaaaaaaaaaaaaccaactactagtcttaaatattttatatggtatttttgtatattgatacaaatttgagggtatttttgttagaacctactgtacctgcatttctactcttgtttaaggtattttaactatgtaactcacttaatgaaaattttagtccttgaaagttattaatacaaactatttaggataataaagaaatgcggttagtagtcacctattgcaatcaaacttgtagtcatgttaggtatattttcaaatatcaaatatcaaatatcaaatagagatatattttagacaggtagtcttcaaacacttcagaatctacagaatatggcttttaagatgtgttattagccggacgttggtggcgcacgcctttaatcccagcacttgggaggcagaggcaggtggatctctgtgagttcgaggccagcctggtctccagagcgagtgccaggataggctccaaagctcacagagaaaccctgtctcgaaaaaccaaaaaaaaaaaaaaatgtgttattaacacaaggttatttttttgttatgacaatgagacacacctgcttctggcagtgccaatctactttagagaagatgatgggcatcaaagaaactccatacagagtttactttctttgtggcaaatgttagccacttcgcaagaaactgccattgccttgactgctgacagtatgctgtccaaattggaaaatcgggacacacgaaaatatgactgccaaattttgccaagacaaggcaggacagtccttcaaaaatcctgcttcatagaaaagtttgtcagatatccgaggcctgtaggccaaagatggatgcctcaatgttacagacaaaccttggatgactatccaggcagccagctgtttctgtgagttcttagttctgaaagttgtttgcattgcacttcctgttttctcaagtaatagtatatccttctcaggtctctgatggagttaaagactagatatagttttccttgttaccaaattcagaaaagaaactcacaaaaatgtgtaaagtgtataaggttgagggacataaaagatagttctgggttggtaatgcaagttatgatagaaaataaattaggtacaagactctggactcaccaagataggatagatatgggatattttctctgaatttgtcaaatgcaaatgaactaaatcttgttaattattgtctatatatatttgtatatacttattgtacttattgtatgtagttttactatgttagttaaaacattttgtttttatttaaacaaaaaagggggaaatgttgtgtgatattttgattgtgttctgacaaataaagctttcagagggcagagctaggcactagctaaccacagaggtttggaagactgtacagagaggagacatgaagtagcaaggtgggacagagagaatctcagccccttttggatggaggaactgaagaggtaggaagcaactagcaactaccccctgttctctgatctttcaggttcttaccccaaaatttaactcctgattcttaattgataaaaattcattagattaacacttcactacaccttgagaccttgtatcaaaaaaataagtaaaatgttagtggatgaaattctgaaaggaaacagacttgtttaatctcaaattatctttctgaaagtactaattacaagaaaaacccagggtggccaagcccgacgacctgagtttgacccccaagacccatatgggagaaggagagaactgctcaaagttgtcctttgacctcctcgtgtacactgtgtcatgtacacacatagtaagtacactagggaggctgaagtgagccaagtacagtatactacgcctcacaacatggaacgtgttcaaaagcactgccggccagacctcacaggtggactacctggaagtcttttttttttgagacagggtttccctgtggctttggaggctgtcctggaactagctcttgtaggccaggctggtctcgaactcacagagatccacctgcctctgcctcctgagtgctgggattaaaggcgtgtgccaccaacacccagctctggaagaagtcttacacaagaaacatttttatttcacccacatcatattctgggatagaactgtgcatggtgcctcatacctatttgtcctgataattgaaggctgagacaggaggattgctgagagttcaaagccagactgagctagtgaatgagttccaggtcagcctgggcaacaatgtgagaccctgtctcaaaaaaagataaaagtaaaactaaagttatagaacatgcaaaattacaattttttttgaagtccagaataggtttcattatggcatttttctttttttacagatttatttattttatgtgtacgggcattttgtctgcatgtatgtttgtgtgccatgcgcatgcctggtactgagcaaggtgctggatcccctggaactataattgtggatgtttgtgagccatcatatgggtgctgagaagcaaacctgcctctccacgggctcgtgacacaggtgtgcaccatcacactcacctttcattatggcgctttcacgtgtgtcactgtactttgctttaatttatatctccaatgccctcttttccacccctgttcatctctggctagttcttactgcaccctggaaaattctcccttccacttacatatgacatgtattctattatctgcatacaagttccagactgtcacaaaacaaacaaaacgtaaaacagcaagggacctctgctgctctactcttcttatctcatctttccccccttaaatgtgctgacactaagccacctgtgactatttaaattaatgaaaaatataaatgaaattcactttagtctcactagcacttaggggagggagtttggagacagggtttctctgtgtagccctggttgtcctagaactcactatgtagagcaggctggcctccaactcagagatgtgcctgccactaacactttttgcaagtgttcaacagccaaatgtggcatatgcctattgtactttctgactgataaattttgtgattactgtatagtgtgtgacttctatactttgtgtgcatatgactactctattgactaagtaagtgaacatttccatcatcataaaaagttctatcgggagctaaagaggtagctcattgattaatagcactggctgttcttccagagaacccaggttcaatttctagcacctatatagcaattcacaactgtctgtaattccagttccaggggatcagacactctagcacagacaaacatgcaggcaaaataccaatgcacataaaatgaaaaataaatcaattatttttaaaagccagaaatgggaatttttaacataaattttgaaaaatacaactttgcatgtgtgtgggggatgtgtatatgtatgcttacatataaggggtggggtcacctatgtgcatgtgaaggcagaggctgacactggatgtctgctatcagcccgagctcatggcttggccagtctagttagccagcttgtttcagggactcccttactctatgtctcaagtgctggattatacgtggtctgctgtgctcactctgaatttatgtgtgttctggggtcccaaattttaagtccttccacttacaggtcaagtgctttacccactgaaccacttccccaatcccacttacaacttattgtctaagattaaatgaaatgaaatgaaaattaaatactaagatgaactaaacctatctgtggccacatatgggtcatggatatatatacaccatcaaactgaaaattttaaacaatacctacaatatcccaaaagcataaatagagacaatacttctcaagctgattattatgggcttctcatgacaggaaaaccaaaccttattacagaagggagagggttttttcagagctagacactgaccctagatccttgtacatgtggcactagtgttccaacagttgagaaatgaatttccctctccttaatgctctaaaacatttccatagaaactattttctctcacaacatgaaaagggaaaggctagttatcagaatcaagtctttaaagggagctgaaaccaaataatggttttatatttaagctcttgggatcttaaaacaagagcccataggtggctgatggctgtaattccagcactcaggacatgcggacaagtgatacctgcaacaagctgactagtagagtagacaaattggggaactatgggttcaaatgagataccctgtgccaattaaagtgggaagagcccaaggaaatcatccaataccatcctctggcacctacaagcagacacacatgtgatcacgtgcatctgcatacacacctacctcccacatatgtaaacaaaactacatgcacgtatacacatgaaaaagattgcattttaaacttgcatttcctcctatttgtttgtacatatgtttgtctttgtgactgtgcacacatatgtgtgtgtgtgtgtgtacctgaatgcagaggaaaaccgtgaacagtggtactgttccttagggactgctcactttttttttttttttttttggtttttgagtcagtgtttctctgtgaaacagtcctggctgtcccagaactcactctgtaaacaaggctggctttgaacttacaaactcagagagatctgcctgcttctgcctccccaagagctgggtctaaaggcatgagccactactgcctgctctttttgtttgtttgtttgtttgtttgttttgttttgctttgtttttttgagaaagggtctctcactagcctggaacacaacaagaaagctagaatagctgactattgaggcaaaaggattagaagtatagtgattcataaatacatgaacaatctgacttatattttgcctatttgtaaaaaggaaaaagcaaacagccctgctacctcagccctggagaccttctggatgcagaacaaacagaaagctgttaggggaacagagcagggtgtaaaaattctaaataagcgcctcctgaagaaggcctgggaagaatgcagctatcaagaaaaacctgatgggattgactcccttgtgaggcatataaaatgacctatcccaagacatagaaaaatatggcaatcacaggcttaacttcaattcaaagacaaaaggtcagattgtattaaagaaaaaagaaaagtcaaaagagcgcctgcaagctaattccccagtgtctgttactgtcattgaaaaagaggacggtctcaaaccccaaggctttaggaattccaagaaaatgctctctctggcagtgccatatgctaaaattggaagaatacagagactggcatggcccctgtgcagggatgacacacatatttgtcaagtgttcaatattttaagatgctttgaagttcaataaagcatgtaggagactttagccagagagagagagagagagagagagagagagagagaatcccaaacaaaaaggaagagggaaaagaaacttcctggattgtgctaggagttcccttaacccccaaactctagtctccctcaccagcatcacagtctcaagatttttttatttattttcttttcccattctgttcctttgttatttttgtttgttttgttttgtttttttgctatgtagcccatgccggccccggacctctttatgtaatcagactggtctcaaactcttaacaatccccctgcctcagtaacctgagtgctaaagttacaaatacacatcaccacaaagggtaaaaagctcagcttgttttccactgtgggccccaatgctgtacatactagggctctctgttttattttgcgtgctatcagatcataacactgtaagcatctctctaatttggaaagtaggctccaagccaaggtcaaaagaagagcagagttgggggaaggcaccagatgggctcaaactatcattttcatcagtgactcaccagggagccagatacagcatcccttcttttgaccccatatctcctaagagaacagaaaaaagtctttccctttggttctgatgacacactagcttatccactatctacattttggtctctagaaacaaccagaagaatggaggcaggtttatggtgtcaaaagaagaaatacaaactaattttacagttcttttgattctagaaaagaagtaatttcctttcccttcatcacccctcatatttacaagccggtgactaagtcctttccatgaccaaatcattgccatttgaataccaaataactacatctactgaactctcattagactgtattctagacacacaacatgtattaaccttttcaacatgtactattattctattttaattttttattaataattattattattgtgtgtatgcgcacattcctatatgcctatgtgtgtcatacgtaagcatggcatgtccatgccatgttgtgagtgtagaagtcagaaaaccatgttggaaataaggactcttcttccattgtaggttcaggggatctaacttgggatgtcgggcttacgtggcaagtgagttacaggctgatccatcttggtggcccattatcctactttataattgaggaaactgaagaggaaagccaagagtatccaaactacatgagtccacatgtatcctattcctttgtttcttattctgaaaattttcaagtatgcaaaaaatttgaaatgatacaattatcaaacatttatcatctagcctatttctgttttttcattttatctagtttaaatgttaataccttgctacattcaggctcaggttttctttttatatttccagttacatttgtttattatttgtgtgtatgtatatgtgttacagtgtatgtgtggaagtacacatacaactgtggaaattggtttgctctcctcagttatgttctggggatataacccaggccatcagacttggaggtaaacaccctgaaccagatgaaccatcttgctggtccaggtcagatttcctaaaggataaagtatacatataaaagatgaaagaagctgtgcatggtggggtgcaaacctttaatcccagcactggggaggcagaggcaggaggagaaagcaaggaggaaaggaaggaaggaaggaaggaaggaaggaaggaaggaaggaagacaggggaggaaatgcacaggctatggcgttgtctccgtggctaaaatgctcgctgcacaagcttgaggacttgagctcagatccccagcatccctaaaaagtctagcatggtgtcatgaacctgtaatcccagctctgaggaggcagacaaggggatcttgggagcttgctggccagccagtccagctgaatcagtgagcttcagattcagtgagaccctctcagaaaataaagtgaagacaccaggcatggtggtgcatgaccttaatcccagtctagggagacagaggcaggcaaacttctgtgaatttgaggccagcctggtctacacagtgagttccaggtcacctaaaaccacatactaagtctctgtctcaaaaaaaaaaaaaaaaaaaccccatttggacctctggcccccacatgtacacatataggcatgtacacttacacataatatctctctctctctctctctctctctctctctctctctctctctctctctctctctctctctctctcacacacacacacacacacacacacacacacacacagcaaatacacactaattatgtgggaaaggcttgaattcaacaagaacataaaagaaaatcaaaacaaagtaacttcaccatataatgatttgtctattaaactagcaaccacaaatctaatttgaaaagtcagtgccagcagacaaagagacagttcacgcctctgtggatactgcaggtgacaccacaggctggctcaagatttctgatgaacactctggtttttgcatataataactaaaactttttgcagcctttgatccaattagaaaataacagagaaaaaaacttgtcattggctagggagagggatcagaaagtgagagcttactttctctgtgctagcacaaagacccaagtccaaattcccacactcacataaaaagccaggcatggctgcaaacccacctgtaaccctagcactactcggggtgcagacaagacgattgatccatggggccttttgactaccagcctagctccaggttcagtggaaaacctgtctcaagggaataaggagaagaatgctagaacagggtacccaatgtcctcttctagcccctggatgttcacacggacatacacaccaacacatgaccacacatacacatgtatatacaaaaaaaaaaagaagagtaaaaaggatggaaggaaggtatataaaggaaggaaagaaggagtaaaaaaaggatgaatgaatttcaagctggcctggtaataaaagtctgttatcccagttactcagaagtcctccttacattgtgagtataaagctagcttgggtaatttagtagatggcatttcaatttttttttgttttgttttgttttgttttgtttttcgagacagggtttctctgtgtaacagccctagctgtcctggaactagttctgtagatcaggctggcctcaactcacagagatccacctgcctctgccttccaaatgctaggattaaaggtgtgtgccaccacccagcggtatttcaaattttttaaaaagaagaaaagggttgaggatctggcttagtggtagagcacttgactgttgtgggtccagccctacattcaattctcagtataaaaaaaaaaaaaagaaaaacaaatttctactacacacacatactactaacaataaacaggtatctcaagttctacgaacaaaagaattaaccttttaccactatattcatcaatctgactccatattatcaagtcacttaaaatgataagcacagggcctgttttaatgagtggaggtgtgcaatctgccctggctacaaaccactcttctgtatgtgaatcccagtgctgccagtacactttgagcaaacttctcttctaagaatgaacttggattcctttgagtccctgttttttttttttttttttttttaatggggtagggtgagtagtcaaggatcaaactcagagcctttcatgaatgatgactgttgtgctctacttccacactacatcccaagttcgacgtgtatatttataagctgaaaataagagacggttggaaagcaaactcctgagtcagactacctgaactcttagctcagtgctgcatctgatggtttagatgactgaacctcctgacattctagttttaattcatgtgtctaaataaaatatatttagttactctgtggctgagaatagaatctaccccattaagttctttaaagttgatatacgatgatgactgcagagggcttaacataagtatttcacatgtaggttattctccacaaatatcagcactttatattcaattattgtggtcggtagtgaccactatgttcttgccatggcaaagtggcctaggttccaaagtagtgcagaagtcagccaggtgtaatgatgtaaggctggttggtgccttacaccaacaatacctaccatcactttcaccagtgtgcagtcaactgcttattgaaaatagcagacactatttaaaatttgccattttaggaaactagagaggtggctcactggctgcttttccagaggacccagattctattcccaacaccacatggcagctcacagctgctgtaactccagttccagggaatctggtgccctcacataaacatatatacaggtgaaatgctaatgcacataaaaataaatctttaattaaaaaattgccatttttgtaatcactattaagaaccttacaagataagtgtaattattaagaaaaaaacaaaacaaaacaaaaccatgagctcaaagaggtatatgcacattaagtgaaacaaagaaaatgtctgtccagtgtttagtggatgccaactctaagttaactgtccctacacacttgcaatgacagacacagttaaaacttggccattaagtctcctttgtttcatgttagtctgctttttcaaatacaagtgggaaggcccaatcccagcaacactttgaaacgtctgctttgttttgtttgtggcatgagggactgaagcagggccccatgtatgtgaggcaaacatcacatccaaccactgagctacatccctagctccaaatgctgctggtgacccatgccattcctcccccaacccccagaaggggccaggcaatgtactaaatatcacttgggcactggcaccagcaagcgcttacctggaggagatagagaagtcctggggcaaacaaggtgactgggtatagagtctggtatgttgctaaggcaagaaaaatagcactgaggaaaacactgcctgtgaaaagaaacaaaggtgtagaataacccagcctcgtcaatcaagatttcactcagcaagtccacatcaacatgaaactcctaactgctcaattacctgccaagtgcttcctgatatgcaaagtactctgcaaactcaacagaatgaaagctcttggcttagttcccttgaaaggaaatcaaggaagtcaaaatcacctgcctttaacaaactgtgatgtcacagacatgtttcttaagatttttttcagatccagaaagatttttataaaacctcagcccagggctggagagatggctcagtggttaagagcactgactgctcttccagaggacctggggttcaattcccaggacacacatgcagctccaatatctgacactctcacacagacatacaagcaggcataacaccaatgtacataaaataaaaacaaattggaggctggagatatggctcagtggttaagagtactgactgctcttccagaggacctgggttcaatttccagcacccacatgacagctcacaactgtctggaactgtcagttacaggggatctgacattctcacaccaatgcacataaaataaaattaaatttaaaaaaataaaaataaataaataagctgggcattggtggcacatgcctttaatcccaacacttgggaggcagaggcaggcggatctctgtgagttcaagatcagcctggtctactgagtgagttccaggacaggctccaaagctaggcagagaaaccctgtttcgaaaaaccaaaataaataaataaataaataaacaaattgcaaaaaccaaaacacataataaaactcagcccaaagatttacaagtagacaacaactattaacatccatgtcaattgcgccaagttattaaatctgcaattactgttcatgaaattcagagctgtgaaacctagccctctggatttcacaacagctcatcactctgtaatacctttatcttgaagccacttttttttttctaataaaaacattattgatgctttatttttggtttcactttgtagcctaaactggcaccaaccttgcagttatctaagtcctccaagtactggggtaacaaacataagccaccatatccacatctagctaagagtacattccttttattaatgagtctactccctacacaaaacagactactagggagtcattaagcatgcaatgaaagaatctgtgatgatacgtatctaaaaagatacggaaatacattgttaagtagaactttagagatacatacagtttatgccatcagaccccactgttttctttgaaaactttaaaatgaacataggccaaggctacaccgagaaactgtctcaaaaaaacaaaacaaaacaaaacagaacatatccaggtggtggtagtgcacatctttaatcccaacattcaggaggcagagggaggcagatatctgagttcaaggccatcctgatctacagagtgagttccaggacagccagggctacacagagaaacactagaaaccctgtctcaaaaaaccaaagagtgtgctttgtttgtactataggaaaggcattaatttttctatttgaaaatacacaaacaagcaaacaacagttattccctttcagatgtattaagacaactaggtactttcatagcaaggggagaggtgacctagaaatcagttgacatagtggttcaaagtgcatgtctcatatgattatggtttataaaacaatagtgtaatggctgtgactgtcctggaactcactctgttgagcaggttggccttgaactcacagagatccacctgcctctgcctcctgagtgctggggtcaactcttctcaatgatgtttcacaagaagaggaacccctcagtctactcaatctgaggaagcttaccactttcccaacctagctccagggagacatagagagaggtgatcaatatgctcttttactcactaaagtagtctatttacttgatggcaatctcaccacaccctctagtggtctatagacttgaaacatagaagaatcaccttgggaaaagagacaggatatgggggagaagaacgaatgagaataaagtataatgacacacagatgaactgtctgtcacaatgaaatcattattttgggttttgttttgtttttttcttgacacagggcttctctgtgtagctttggagcctgtcctgaaattcactctgtaagccaggcttgcctcaaacttagagacccatccacctgcctctacctcccaagtgctgggactaaagtctttgctgccatcacccagcttgtatgttaatcttttttgtttgtttctttgtttttgtttttccaaacagggtttctgtcctggaactagctcttgtagaccaggctggtcttgaactcacagagatccacctgcctctgactcccaagtgctgggattaaaggcatgtgataaccttaaaaacagatttaaaaaaaaaaaaaaaaaaagatgagaaagtagaaaagaaggactctgtaactataaacaagaatgatcatggtggacagtacagtaagtaggaagaaggcagacaaaggaggaagttggatgtaaacaacaaagaacagaattcctgcatcaaggctgtcccactgtatggggtgaagtcaagatgttcgcaatttcaggtacttgctaaaacaactgagcagagatagggacaggcctagccaagtcctgataccagaagaggcctcctcccacctactcagctacacagatctggaaccagaaccaggtcaccctgagacagggatgtgccagccataagaaaggtgctttgctacaggctcaaagcaaagtaagctcaggattctctgacctggccaaaaaaatgcctaacaacttgtagaaaattggctaagagtgtagaaatgttagagagaattttttatttcacaagcttttcaacatatttggtagttggagagaggaaaacccattaaatgttgtcagagtggggaggctattgttccgcttcattcattcatacaaaggaggtaaaaacacaaaccttcaccccactctctgccccaggagacaccagagagtgaaataaacacagtcacctcctgccctaattgcctaagatcaataactgcttgtctggaacagctgtctgtaagacccaagagaggaaaaaaaggctaatacaggaacagaatgaatttagaaatgtcttagaaaatgtgctctgaggaacaagaagtagcctaccttcctttttattattagttaattaattaatttagagacagagtctctctatatagccctggctatcctagaacttactatctagaccaggctcatagatatccacctgcctctgattcctgagtgctaggactaaatgcattcgccaccacactcagccctagggtgacatcttaatttttttttttaattagtactagggattgcaacccaggaccttgctgggcaagtgctctaccactgagctccattcccagtgcctagatagaaatcttaggaagaataatctgttccacctgctttctattaacaagtccagctggacacctcatctccacattccttcttacaccagttcccacgcccacagccccacctctcaggtacgacagacagttcatactctcatctaccatcagtgctcagcagtctctcttttcttggcccctccttcacagaagcaccaaaagactcttctgaagcagacagtgacttatctaagactaagccaggtatggcagtgcacacctataatgtcagcactcctagatgcaagacaggagggtcaggagctcaaggacacctttggcttagttgaaaccagcctgggctgcatgagaccctatctcaaaaacaaaaaaagtcttttcccaatactgccatacatttcccaatacattgaggctcaagtgcattcaagattggacttcacctataacccactgctcttttcctgtcatccttcagtggcatgtgtaacccaagcagagttaacaacagtagtgactgctccgttactaggtgccatgtatatgcattgtgtaatgtctacctcaaaaatgtgccagactcaaagaggccctggggggaagcagcacagcagacttgggaaagaactgttctcagctcattttcttgtgacacataaaatgtgataaaaatcacataatctattcatttcactaatgaagaaaccaaggcacagaagcaaggttaagttaaaaaacaaaaaacaaaaaacaaacctaaggctgcccaactgcccccaactcttgctaagcagcatcatctgctgtcttctagcaatgccgtgggaatttctcaagggcagtaagtctttcttaattttgagtctcttctacctttcgaagcagacacaatgaatgaataactgactgactgaatgaacatcattcagtaatacacaggagatccttttaaaaagcacatagctgggtgtggttgcccacacctttgattccagcaggcagatctctgtgagtttgaagccagcctggtctacaagggaagttccaggacagccagggccacacagagaaatcttggggggacagacagacagggaaggaaggaaggaaggaaggaaggaaggaaggaaggaaggaaggaaggaaggaaggaaggaggaaggcaggcaggcaaacacattaaagtaaaccaacacccgtgaggaagaccccacaaagctttaaacagaacattatgtttaatgttatgtaacattaggaagacataacacaaacctgactttaggatggaacaaatcttccagattagcaattgagggctcctaatgccaggggcctgccatggggatgctttctagaataatgatggctgaggcccgaattctggggcaaaagcacagtgctactgtagccagtggcctggtatctgatgacaagacaggcatagatgtggcatatgcatagcctatgcaaagggaagagggcatatggaggtacacaagatttgaagaaatctaaaaagggcaagaagaatgaaaaaggcattgagttagaatgaaacgtggttggcacaggggcagagaagatgaaaaaaaagtaaaattaggttatcaaatattttagacaaactgtgcaataagcaaaccctgcccgagtttgctctgtgtcaaacccagattgagaggtagaatgttaccagcacccacaagagacacctcactcccttttttctttttgatacagggtcttatgcagctagaactggccttgggcttacaatgcagttgaggacgaccttgaacttctgatattcctgtctctactttccaaatgctatgacctcaggcataggccaccacctctagtttatgcattgcaaaggattatgtcagctaggcaaacactctaccaactgggctacatccccagcccagtttttatatttttcatttacacctagtatacttcaataaaagttacaatctgccatctaaagtcacaacaagcagacagagatcacagcataaagggtttagttccaaaaataattcaaataactatgggtctacaactgaaataatggctaaccaggaggagcagtgccaagagggatatgagttttacccctaaacgatacaaggtactagtgtttgctagtgcagcccatataagcattaggtttcatgagcaaagctttacctttggcctgatcacagaaacattaggataaactagctgaattgatataaggactggctgccatatcagggaatgaacagcattacccaaactctgaatatgttttccaactctctgtatcagggtgggggccaaaacaagcctctgcaagaaggtgcctctggggactacaccttcatgagggcctgggtgggtggcaccacagaagggcagagcaggaaagagacacaggaatgaaacaaggaaaagccaggggactgactcagtatacgggttagcaagggatacacagagtcagagactgggtcagacagtgacctgtcccaggcagactggcagtgggacagactgaaatactgaccaaaagggctgaggtccctcaggactatcagaaaaggaaattgcaccagcatctgaggcaacaggagcagctaggaacagagtccactgcacttacatcccttaacagggcagtctgtctcaagggagtctaaccacaccagcaatgaagaaacattgagaacctgctctgttccagactcgactgtgagcacgccacatgccgtcaaaagtatacctttcaataacttaccatccctattttatagatcaggatctaggatgacagaaaggggatataagcctggacaagctcactccagaccatctcaaaaagacaaattaaataaagtgaattatcctatctttaactgtactatttatgcaatgcaaatgtgaaatacagaaacagagcttggagaatgtaaaactgatttagttttactgaataaattattactaggcattactaatatacttgaaaagtcaacgtggttcagagagatgtagctaatagaggattgttcaaatactttaatagattaggaacactatgacagtctctctatagcatacaacaatgcaaaacaaatgtccagcaatagggaagagcaaggcttcagagcaaatgtgtatgagaaatggagatgagggtagggttcagaaagacttgctttttgtttactatgcttaaatttcttttattcttaccatgtgcctgaattattcataatttctaaaattaaaatttaaagtataaaggaaataacaaatttgtgtttaatgtctgtattactttagaaagtttattaaccaacacacacaatttatgaagtactgggaattgaacccaggacttcgtgccttcgtgcatgctaggtaagtgctctatcaagtgaactacatccccaaccctctgtattactttaggataggttctcaaaagtagaacaaataagccagatattatgacacacccctttaatcccgacacttgggaggcagaggcaggtagatctctatgagttcaagaccagtctggtgtacagagtgagttccagaacaaccagagcttcacaaagactctatctcaaaaaaagaaagaaagaaagaaagaaagaaagaaagaaagaaagaaagaaagaaagaaagaaagaaagaaaagaaaagaaaagaaaaagtagaataaaaaattgtatttttctttttttgagacaggttttctctgtggctttggaggctgtcctggaactagctttttgtagaccaggctggtctcgaactcacagagatctgcctgcctctgcctctgtctcccgagtgctgggactaaaggcatgtgccaccaccgcccggcccaaaatacaaacattttaagaccactgataagagtcctcccagaagggtcatacaaatgtgttaagtcaactggtaatgttcataaaatattaaacaaaattatgtgtgtaacattgaaaaaatggctatgaattcattcaacagaaatccagacatataataaaaaagcttccctgtgggaccaaaactgtaggtctgagattttcttggaacctttcactgacagtttaaaaaaaataaaattgtgtatgtccacaaagggaatatggaaaccataggagaacttgtgagagttgggtctctccttacatcatgtgggtcctgggaatcaaattcaggttgtcaacttggtggcaggcaccttaacatactgaggcaacttggaagctcttcctacggtttgtttgtttggtaaacaggctctcatgtaactcaggctggcctcaaacttcccacactaaagctgaggatgactttgaaatcctgaccctcaggtgtttatctccccaagcctgaccacactatgctaccatggctgacattacttttaaaacttttgagacagggcctacgttaataggctggcctctgatgtactatgtaagcaaaggtagaccttgaacttgtgaccctactaccttagtcttttgagtagctctttaaaagtgatatatcaataataataacaacaataacagccataataataataaacaaaagtgacatttttagcactggctatggtgacacataacccagctacttaggaagctgagcaagatgggtcccttgaacctaaaagctgaaggctaacctggacaatatcacaagacctctaatcaggtaaaaaaaaaaaaaaaaaaaaaaaaaaaaaaaaaaaaaaattaaaaagggataataataattagaaaggtgacatttccaaataagagatatgcagcatatcttattctggtggacagaataagcctataatatgctcagcctatctgagcttggcactctggagacagactgaggcaaatataaagtctctattgttaagaagtgcttgttgcaaaatgaccacaaccttcacaacaagacaattcaagttatacagtgttttttttcttttttggtttttttgagacagggtttctctacatagctttggagcctatcctggcactcgctctggagaccaggctggcctcgtactcacagagatctgtctgcctctgcctcctgaatgctgagattaaagacgtgcaccaccaacacctggctacagtgttttttttcaatactgaagtttgaagctaggggctttatgctacactctaccactgagctacatccccagtgtaatatgataaataacccaataaatttaactaaaatgcctgaagaaaaaacattataagcaacctagaagaaacaaacaatgtctcacgaggagctaagtcattcttatgtgctacactgagaaaggtcagtaccctgtacataaatggtctatgacacataatatcaggtgacgactatttcttgatcttacaaatgattaaacaatactgtttagaaataagaattcttatgatattatagggatatattataagaatagaaatttagcaacaaattttaaaaaatcatgagcctggtagcacaatgagaccattgtaaaaaaataactggttgtgagagcaaaaaaatacacaacagggaaggattaggaggtatggccttattggggcagctgtgtctctgggatctggctttaaggtttcaaaaaacttgtgccattcccatgcactctctgcttctgtctgtgggtctagatctgagccctcagccgctggtccagctccatgcctatcaccgtgctgctgtaaccctgccacgatggaactgcaagcctcaaataaaccctgtcttctataagtcgccttcgtcgtggtgttctgtcacagcgacagaaagtaactaagatatataaagctacagacaaaatgtttgttggtatatatgggaccatgctactggctagcttcagatctccatccctccctgtgtccaggctttctgtcaactttacagtgcctttccatgtggacaagaaagatagtcatcccctcccccgttctgctacaagcattctaccactggactacacccccaggtgtaatatgataaataatgcacgcaatacattaatttgttttgttttttaattagggtctcattgtcagtcaaactggcctaggactctttgttacagataaggctgtcctttaatttgtggcaatcctctgcctctgactcctggatgctaaaatgacaggcacatagaaccacaactggcccatgtataatattttgagcaatgggatatttgttagtattcaggcatctgtactggcctgtccttggagttttgacaggacatgccctcagctgcagccactaagcgcaccacccgggcacattcactatgttcccttttaaatgggccctgcctacctcctctcccctttctgtttctctgtctctctgtctctgtctccccccctctttctcttctgctactcctgtccccaaaggccggtctcccttctcctctccccccttttcctattcactttccccccaaaaaagcccttcctccacccaagctctattgcatggtatctttctcacaagtgctgcttttttttgtttgtttttttgcgccaccaatgcccggcacaagtgctgctttttaaaattacaactattaatatatatgattcaacctgtcatgcctggccagagagtgcccttaatcccagaattccggggcagaggccagcagatgtcatttttagggcagtatgggctaattgaactccagacaaagcctaggctgcaaaatgagatcctgtctctaagaaacaaaaatgtacatttgggggctagagagatggtcaatcgatagtgacacttgcctacaatcccaatgcttggaacgcaaaagtaagtgaacttcagtgagatcaaggctatccttttgtacatagcaagttacaggccagccagggctacacagagagacagaccctgtctcaaaacaaacaagcaagaaagatagttcaatgggtaaaggcacttgtgaaagtctgatgactcaaattctatcccagaatccagaaaaaggtagaaggagaggcaggtggtacacacctttaatcccagcacttgagagccagaggcacgtagatctctatgagttcgaggccagtctggtctacagaatgagttctagaatagccaaggctatacagagaaactgtctcaaaaaaccaaaaccaaaaacaaacaaataaacaaacaaaaaacatcagaaggagagaactgcagagttatcctctgccccccacacatgcaccatagcatgaacatatgataataataaaattaaaaactaaacaaaacctaaaatgaaacaaaaacaatctaggaaaaataggtgtgatataagaacatagaaaaaaggaaaagtaatactagaaagtaaaaataatgatagttgctactctgtctagtggtgaataatattcacagtatcacgaaatgcaaaactgaccacaagttaattgatttttttggtgctagaatttaaaagaaagagctagccatgcatgctacgtacatactaccaccaagccacatacccaacacaactactgatttaatcaaaactgaaatataagaaaatcaaacaaagatgtagcagggacattggtataaaagagctataagaaatcttcttttctcataatggaacacaattaaaaatgtctaaaatttgtcattcataaggtagctatatagttcagaaatatagaaataaataatagtaaagtattgctccaaagaagctgaactagccagaagtgatggcacaagcctgtcttaccagcacttgggaggtggaggcaggaagattaagagtttagtcatcctctgccagcctgactcaaaacaacaaccaaggctggccttgacaccttacatatcaggactggttctctttctttatttctgtcctgcttccacaaaagattttcatcagctaaacagagaagacaacagctgaactagggctacagaagacagacattctcatcattgtctgggaacttttctcaaaaccatatgtcaacagtgattctttcagtgctagatttttcaggactaatttttttcctcttggtttaaactacattttctataataatcttttattatttgtgtgtaatttttttaaaatattgtatttttattttttagtcaaattcttgctatatagcacaggctgatcttgaattccatatctgtctcctgtctccccctcccagacgtggcgattataggtatatgctaccatgtatagcttgtgctgcttaaaaggaggaaaggaaaaggaaagaaaacaagctggagcagaagtgtactcttgggggccttaccttttattgtggtcaaaatgaagaaagcaatgagggtgttgttgatagcacaggtagacttggcaacacaagacaggatcgtataaggatttaggaggtagctggggaaaacacacatagttgccattagtaaacctgaccagtggaccagagagtcctggccaccacagccatgaagttcaacttatttacaaaaaggaaggaaactccttagaaacaaattatcccaaatacaagaggataaagtgcaactgggtgatatgaataaaggcactcatcattatgctataagacatatgcaaaacagggtctcatgtagcccaagctggtcttgaactctatatagctgggaatgacactgaaatcctgatcctctagcttctacctcctgagtactgggatcacaggaatgtaccacctggcccagtagcattatctaacttttgcagatgaggaaactgagattcagtgattaaataacttgcccaagttcttacaagctactaaatatattcaaaaatcaggtcttcctggttctaaagccaacattctttctactaagccctttttatagtcaagcagtatcccatgacccagactcatgaacagacaaagtttcctctaaattctacaagggagctggcacagaacttcacagatcttgatctcccattaggagagtgttaaactggagtcctttccccctaaagtaggaaagaatggaatcagaaaatgaatccgaagtgctttgagtaggaaagtcttacttggtcaaatggattctttttatttatttctgtcctgcttgtacaaaagatttgcaccagctaaaatgacaacaagtaacaaaagtagtaataaagtaaaacgagtcataatcaagaccagaggaaatacctaagaagaaaaggtaaaggcaaaaccaggaaaaccaaagaaccagagcagtacaataaataccagcctcagacagactacagctgcacagtaattagcctcagacagactacagatgtacagtaccagcctcagacagactacagctgcacagtaattagcctcagacagactacagatgtacagtaccagcctcagacagactacagctgcacaataataaccagcctcagacaggtcaacagctgaacagtaaccagcccatataggctacagctttacaataaccagcttcagacatggctgactttcctggcagacaaagccagttacataattctgattgtcgaaaggaagaaacacaccagcttctcagtaaaagattataataattattcacaaataaagaccttaaatctaatcccacctcctaggaatgtaagattagtagttctaaaaccaaaggcctagaaactctttcgggcttggtgaggtttttcttatgttttgtttttcccagcaatcagatagacttgttacacaacctttaaagaaatggctgctgctatgatgaaactaccctcaggggacacaagagtccataaggattcattatgttgctaaacctttggtctattaaagtatttcccatcaaatctctgaaatatgtagttgagaagtgataaaccaatattatctcacaggagaaaaaaacagaaaaccatttctaaatagtgggtgacattgaagaagcagctgcctagacatctacctggaacactggagatttatacacagggcaaaggctcctgaagacccccgccccaggacagactctaaggtgacctaaactggcttcaaactcgccatgcaggtgaagctgaccttgaacttttgttcttcctgccacccctccccaagtggtggggttaaggataagtatcaccccacccagtttcttgggtactggggaccaaacccagggccttgtatgtgctatgcaagcactctgccaaccaagcaccctccacagccccttgtttcctgatatggaatacttctacatagcacagatcagcttcaaactcatcaatcctcctgctttaggcctcctgaggctgggacaccaagcttctaattctaaaaaattctatggtcatgtttttccatgagaaattttatgttttgttcaatatgtgtacctagaaactagcatgttattaaaatctgatgactactagttgattaaataattcacttcacctatctcagaaacacaaatgggaatgatctgagaggatcacactcactggcagtaccaattactcctagagaattctttcttaaagcatcggctggtatcactcttccaagctggtcacctagcccagatgagaattttacttcagttttctaaattacaaacagagaactaaatcatatgaggaatatagaagctatatgaaacaacagccacataaagaccagaattttatacaggacatcaggaatgaagaactaccatcttttagaaacagcaattaaagcaggttggagcccagatcagcactgagtcagaaagcctttgtaaagggtttgattgtgcatgtccctgtgtgagtctttgtctccacagacacagaatggctctgtgtcttttgctggccaaaactccagttgtgcaagagaactacagcaaatacttgatgactaagaccacaaatctctaaaactacaacaacatgagaaagtctcatcagattttccttgcatttgttggctctgagctctgatttgtaagggaatacttacaacagggccactttcagagggatgtatcgcatttccataggggttcggatgagttcggccacatctggagcatactggtccagttctaggaggagtttctgctttttaaactagagatgggggagggtacacagacacacaaaacagatgatttgccatggtttttagaatgaagacaaaaatctttgccctggcccacacaccactgtctgtgctcccctacttctccagggtactctcaaaattgctcctccaccctacacccactgagatccagcacatgaacagacaaagctcctcatgctcccagaactctgcatttaaccccgattctcccctagttaatgccccaacagccttgagagttcacctaagtcctccctttcttgaaaggcacacagtcctttagctgccctactgcccattctttcactagtgctcacagctctaagttttgccttctttgtgaaattaacacctggctcctccctagagagtaagttccacaagggtgtgagttactttacttgctctctgtgtatgcctaacacttagcactgtggacaaaaaattagatgaacatatggtgaggccacttcttagtcatcccaagaggctacatcactggtggccggacttcaaagttctatcagcaaagtatgttgaaacagtttcaatgatctggatgcatgttatctcaggttcccctcctcattcttctgtttcaaaggtttgtttgcttttcttttatacttccatagaagaggtgtgaaatagttaaaaataaaggagactggtgtggttggggagctaaagatttaagatgccgtcataccggggtggaaagctctttactttctcttatgcaccccaacaaattcatgggcacgagttctaaaagggaaacatcatcacagcaaaggacagactaggttaatgacactttggccaagatcaactgactaccaacagttagctttcacattccacaggctaacagcagatagggtaggtgtgaagtcccttcagcaccagttttccaggatgctgtgcagatggcagggatagactctcaagtcctcccaagactaaatgtttgcagactataaagcaggatccttgtaaaatggagactttttaaaaataattttatgatactttgatcataatcatctcccattgctctcttatctacttctcactcctgctgtactcttggttccaacaagtccctctttattttcttttattttatgtttatgggtgttttgctggcatgtgtctgtgcaccatgagtacctggtgccaggaaggccagaagagggctttggatcccctggaactagagttttgaacagttgtgagctgtcaggtgggtgttgggaatacaacctgagtcctctggaagaccaatcagtgctctgagctctctatgttcgaatgcgcacacgtgcttgcgcgcgtgcgtgcgtgcgtgcgtgtgtgtgtgtgtgtgtgtgtgtgtgtgtgtgtatgatagagacagacagacagagatgggggagggagacagagacacagagagaccagttgggggggacagttaacagaaatagagagacaaagaccaactgagtttaattaggtttgcttgcatgagcatgggaaggaggctttatactggagcatagacaacttaccagtggtaacactactgaagaaaatgactctccctcctttacaaagtaaagccttttaggaatacatgtgctgacattctatctaaatcaatagtggtatggtgtctaggtgtggtggcatacacctgtaattccagcacccaaggcagaggaaagatcatgagttaaccaggactacataatcagttctagaacagtctgaactacatatggcgactcagtctcaaaaaataaacagggtcagcaaaaggactcataaagtaaaggatcttgccatcaaaccaaatgacctgagttccatccctgagatcaacatggtggaagaagaggatcaactccggaaagttttactctacatgtgtagcagagcaagtgtagacgcacaataaataaataaataaataaataaataaataaataaataaataacgaaatagcaaaggcttggagtgtacctcagtagtagactgcctcacatacataaggctctgggatttatctgggttttaaacactagaaaaagaaaagaaaaaaagaacagtatatgacgtgatagtagcactaagagctgctactttcagcattcatgtgggtgtgaaacaaacccctaatccagtactcagaagactgactcagtggccagggtggtggtggcgcacgcctttaatcccagcactcgggaggcagaggcagacggatctctgtgagttcaaggccagcctggtctccagagcaagtgccagaataggttccaaagttacaaagagaaaccctgtctccaaaaaccaaaaaaaaaaaattatttattttatttgaggtgtgagtgtgagtgtgtgtgtgtgtgtgtgtgtgtgtgtgtgtggtgcacatgtcagaggataactttcaggaatcatttctcttcttccaccatgttggccctggagacagaactcagatcatcaggcattgctggcaagtgcttttatcccatgagccatctcaccagccccacctaactatttaaaaatagttggatctttaagtacatgacttttgattcatggccataataagcacattaccaaatcccaccagccttgtcctacccactatgacttaccacaactttattgaagtcctgaattgcaaaatacagggcaatagcagtgagggcatctgttatctgtcaagagaaagagaagtaacagaaagagaagtaatgggagtaataaaaagtacagttagtacatggtactggaatactgccaggatggaacagaattgacttcccaccaccaaactcacagtcggtcaaggcctactcagggaggtatgacagaaaaatctagattatgatccattcaatcaggtggcccatatctctagaccagcaagttaaatgaaaataagccaggccttgtggttaacacctgtaacaccaggacactggagaactcccatgagttcaagatcagccttgatcacatagtgagatcttgtcaaagctaatgggaataatatccaccatctgtaggcttcaggtatgcaagcacctcacacatggtaagtcctcaacaattagccattacaattaagaaagatttcagggtttcttaagatatccagattttcaactctgtggattatgtttcaagctgctcttctatcaaaacttgccctgtcatctcaatcttcaattctcgtccttgaaagcctcttcagctccctcagaatcccttggcagaatgcttaggaaactcaggatgccctccaaactggcatagttagagccaaccacagactctcagggttagaaaattgaagactacatagtccaataaaccaaaaaatgagaaagaagaactggttgcaagaccccgcatgttcctcatactccacaataccacgccaaagccagactccaagctaaagatactgtcctggcttttattttttgagaagttccagttcctgtttttcctttcctttcctttcttatagacagggtctcaaaatatgcccctggttggcctggaatctgctatgcagaccaggctagcctcaaattcacaaagatccatccacctgcctctgcctcccaggcgctagaataaaggtatgagctcacccagctccttagtttcttaaaaacaaactgtaaaattaaaagcatatacatatattgatttttctctggaaagatacttaccataaataccaattctgcataatcgattaggaaatgaaagaggtatattattaatggagtctgtaggagaaaaacaaagatgaaaaaaattaagttaaaccttaatacaaattatccatttccaagttggggacggggaaaacttattcagctaaaaaatccaatccttcctgcaacagttatcctgtactcattgaacaagttatcatcctatgtcacatggtatcactgaaactatcagttgaacacagtagaggaaataacaaagcctgatattatctagattatctgcctggcatgtttggcttgagggttcatccctgtagtagatactcaggaggttgaggtgagaaaacagattgaacctagaagttcaaggccatttgaaaaaataaacaagggcagagggtgtaactcagtttataggatgtttgcttaggatgcatgaagccccggggcttgtcttcagcactccaaaaaatcaggtgtatgcttataatctcaggacttgaagtgcaggggaaagaaagggaatcataaactcagagtgatcctggctatacaagttccatgctagcctaggctatgagagatcttgtctcaaaaataagtaaataaataaaaatgggagggggcactccatagaggaacaagattgttgcatgaacaaactaggattttttccttcctctattctctgataagtttgtacaagaatgttaattattcctcagagacctggggagaaacccacatggtgatacctgccgaaatcccagcacttaggctgaagatggaaagttcaagatcaatctgggttattatactgtagaatcctgtctcgagggagaaataaagtgtttgagaaaattcacttggtataaaattaatattggcctgaggttttatttatttattcatttggtttttggtggtgttggagtggcagtggtagaagggtggctgtctgttgttttttcttggtgctaaggatcaaactgggtctttgaacatagtacatacatgctacatcattaagatacatcctcaatttctctatcgctgagatacatttctttaaaaagaacatacaattatttttctatgctttgtttttaatttggtttggttttggacctttgtgatggagggttatgttgccaaggcaggcctcaaactcactatgtagtcaagatgaccttgaatttctgagcatggtgccaccatcttcctagtgctaggattacaagctctggttttaccttttctgctttgttttgttttcttgagacaggatctcagatatcacaggctgaccaagaacttggtatgtagccaaggatgacctctgaacttctgaccttctcacctccacctcctgagttacaggcatgtagtaccacaacaggtttatgagatgcttgggattaaggccaggatttcatgtaaaataagcaactgaaccaacagagctaaatcaccagccctagtctcactattattttaagatttaattttactatttttattgtgtgtgtatgtgtgcctgcatgctaatgccagaggagggcaggtgagggcatcagatccctgggagctgggtttacagcctgacagaacgataatactcaaacctgggtctcctgtaagaatcatagatgcccttaaccactaagccatctctccaggccctgagtctcactctgcaaactgtactcttgggttctaattattctggtacttcccaatgccttcaaacaccttttgggatttactctacttttctacttgtccttgccaacatacctagcccactactgtaagctaactcaccagtccatcagaatcagaaaggaagtgcataattcggttttggtgtagtggctcacaagcatctgtcccaccatttcctaactacatgtaaaaaataggttttataacactataaaaggactaaggatgagggcagtggtggtgcacgcctttagtcccagcgctcgggaggaagaggcaggtggatcactgtgagttcaagaccagcctggtctacaagtgctagttccaggacagcctccaaagccctgtctcaaataaaataaaataaaataaaataaaataaaataaaataatgtagttaaacttgtccacatacacaaaaacctaagtggaaactccattaccaaccccctcaaatatactctgagccaggaatagtgaatcacatctatgatcacagcacttgagaaactgagaccagtccatgttacatagtaagttctaggacagcctgagctatgtaagaggtcctgtttcaaacaaacaaacaaacaaacaaacaaaaaaacaggaggaggacaaaactgtaaagatcactgacaggctttttagtaaataagaacaagttacagtagaaagaaggaaaacttagagttgggatttggatttaagtccatagtttttgtagcaagttgtaactttgaggccttcaggcaagttgttttcctctctgggcattagttttctctaatataaactgggggacatgatctttgtcggaggctgtagagacagctcagcagttaaagagcactggctactcttcagaagaccaagagtcaattcccaggactcatacagacacaaatgcagacaaaacacctacacacaaaacttaaaacttaaataaatcattaagacaatctatctcacagggctctagggaagattaaatgcagttatgtgtatgaagtaattactacaatgcctagcataagctaaatcttagcatatggcttcttgtgatcaacttttgtttgtttgtttgttttttgagacaaggtttctcagtagctttggagcctgtcctggaattcattctgtagaccaggctggcctggaactcacagagatctacctgcctctggtgatcaagtttttaattctttttttaaaaaacaggcatcaattgtctctttccaagttttaaaaggattactgtctactgatggattttattatttgagtatctttgttatcatatatatatatatatatatatagagagagagagagagagagagagatgcacacatatatctgatatttatatttcaaataacctcctttcaaaatttcttgatgcttcagacagtttagaaaggcccaaacaaggaaaacactgtaacagttctcaagaagcctatggctagcctctacagtgagctagcatgtgtgtggcagtgtggttatactggaataaagaagcacatgttgaatataatctatcttcatgctgtctattgatttgagtgaccataaattttttcctaagtactactttagtgctatgttacatatttgacagctaacatttttcactttcatcaatttcaaaattactttctaatttcccttatgatttcttgattcctaggttatagttaccaaagatttgggggattttccacatatcttctgatgttaactctctatttgatccttctgtagtcagcaaaaatatttaaatcgttaagtgacttaaatatattgagccttgcccagctacatagaggctatgttgtcttggaattatatgattgctgaggtaagagtaacagctgctaacagacatttgcttataaatgctgctggattgacccaaactatatattttgaacatgcttttgacttcaaaatttaagactaaggataggttactttggaaaagaagttctgtttttgtttccacagaaaatgataagctgtggattccttctagactaacatggtttgatcaagcaagaccccctgaagcagtggcccaggtgatccaacatccaaaacagctgagatgatgtagcctcagactactacagccaggatttgaacaggtttctgggttttctcaggattctcatggtattgacagcgcctccaaacagcaggaagcaatttggagagaacacacccaaattcctaaatattgtttataaatgtttgttttcatttaaatggggttggttacaaatggttaaagatcacaaccaatctctttctaaagaaagaaaagggaatatgatatagaaatgaatactttgtattggaatggatttcagtttattgatataaatttaaggtcaattttgttatatatgtatttctccccttgtttaggtattgtgtttacacagaccttttaaacatgcaatatataattaaatacagactatagatagtcacctataataatcaaaacttatagttatgttacttaggttttctagatatacatagatatatttcaaatggatagatattcttcaaaccattcaaagacctacagaatatggtatttaaaatggtttagggtttttcttgacagtgagacacagctgctcctggcaacaccaattacttcagaaaggaggatgtaatacagagttgctttcaatatggttaagattagccatttgggcaagaaactgctcttgcctggactgcttgacaatatgctgtataaactggacatacaggacccacaggaaagtgactactgaatttgccaaaacaagatgagacagtcctgcagggttcctgtttcatggaaaagtctgccagacattttgcaggacacagagaaaaaggactgatagaatgccaaaacaggcagacagtttaaaacttcttgattcattgagaagtctgccagacacactatggcctatgggctgaagatggatgctccaatgttacagagaaactttggatgacggtccagacaacaagatttctctgtcattactagagtttatgtattatccttctgttgtctttgatgaagttgaagacagatagttatggttatggttttccttagttataatataagttatatataaaaccttagactcacaaagataagatagatgatagaatattttctttaaattttaccaaatgttaatggactaaattttgttaactataattcttacttgataactgttttgttatatataattttaccatgttaaagttaaaacccttctttttatttagacagaaaagaggagatgatgggggatgttcttctgtatatatgtttcttttattggttgattaataaaatgctgtttggccaatagccaatagaggcaggaagataagcaggccaggagacaagaattatgggaaaggtaggcagagaggcacattctctggtaacccaagaccacatgggaatacacagacttatagaaatggttaataattaagacagagctatgataagaagccctagccatcagccaacagttttataattaatatagtatccttgtgttcctttggggactgaggcagctgtgggtccaggctggaagaaactccagcaagaaattacatgccaacttagcatacaactatttatggactgagagctgcttaaagtttccattaaaaataatagtttctcttcccccaataatgagattgatgactaccttatatgccatcctagaaccttcatccagggactgatgtaagcagaggcagacacccacagctaaacactgaactgaactcctggaacccaattgcaaagaatgaagagtgaagagcaaagaggccaagactgagctgctgaaacccacagaaacagctgacgtgaacaaggggtgctcatggactccagactgatggctgggaggccagcatgagactgacccagagcccctgaacataggtgtcagtgaggaggcctcagcaatctatggggcctctggtagtagatcagtatttatccctggcatactaatggactttgggagctcattccacgtggagggatgctctgtcagcctggacacatgggggagggcctaggccctgctccgatgatgtcagactttggggaatcccccatggagggcctcactctcccaggggagtggagggggggatggggtagggagttggtgtggggcaggggaggaggagagggtgagggagctgggattaacatatgaagcaggcttatttctaatttaaatgaaaaatgtatataaaataataatatgtacatattattattattatatatacgtctcatatattccaccaagccagaaagatggcatagcagggaactgcacttgctgcataagcctaacaagctgaattagatccctagaatccacagaaagctggttgcatctagaatctcagcactcctgacaggagacacacccagctaggcattgccggctaggccagagtacagagaccctacctcaataatgtgagaaaactgacactgaaaattgtaaattgtcgtgccccccccttctcctttctaaaatcctaacctggatcattttccctgtaattgtgaaacatctttcttatgcaaaggatgtctacaaaagggctattcctatcaaacaaagctcaggctttggtatccatgactataaactactctcaatgccagaaaagaaaatataacacttacttcatgaaatactgctccagaatatggagacactcccaaatccaacagtgaaaggccttcaaccactgaaaaggaagaaatacaagttcacaaagatgttagagacaatagcaaatggtcataaactaaaatgtcagatattcctaggaccaaagaatgcttgagtttgtctaatccctttacaatcggtcaaccaagtggttgtaggtcttgatttgaaaaaatttcaagtttgtacatatgcatgaaattctcaaagaactcccccccccaacacacacacaattatcaagaatggagaattcttccatacaaagcagttctttacatcatgagctatgttcattatgagaaagttttataataaactataaccttctgagattggagaaatggcttggcaattaagagtacatactactcttggttctcagttcaattcccgacacctgcatcagctgctcacaactgccagtagctccagttctgaggaacccatcaccctcttctggcctctacaatcagcatgcacatacagatctacacagatacacataacttaaaataaaactaagtataatttttttttttttttgggtttttcaagacagtttctctgtggctttggaagctgtcctggaactagctcttgtagaccaggctggcctcaaacttacagagatccgcctgcctctgcttcccgagtgctggaattaaaggcgtgcgccaccaccgcctggcttaagtacaatttttaaaactataaacttctaaacatctttgtaacatccgtcagctctaaagcatttgttttatgtgtgttctatcctatccaaagcacaattaacaaaccagcagcaggtttttaaaaatgctgtccaggttagtggaacaagcactctctgtgcagtctgtttcagggacatttgtgtcatttttctacagaataacatgtaccttttagctttgtgcctttaatcctaaccttccaggagatttgagaggaagagggggattgtttttttggatggcgggggaggggctggtaacggttgtttggccaggtttgtgttttgtggcaaagtatctagacgtaaaggggattgactccaagcttgcaacccccctgtcttagccccagccccaagcgttagaattataggaggcagctatcaagcccagccagggtgatatattttgtttgtttttcaggatctgtagttcagtctggcctcaaatttcctgtgcagccaagaagcaccttaaactcttcaactctcctgcctccacctcctaagttctaggattacaggcatacaccaccatgtccagctgaaaatgtttgttttttggtttgagggggtttgggcttggttggtttggtactatgggctgaacttgggaacttgtgcatgataggcaataactccagggctgagctctatcacacacatgtttttttatacaaggtctcactatgtagctctagctgactcatgactcactacatacaccaggctggccttgaactcagagatccacttgcctctgcctccccaatgctggcattaggcacatacaaccaagcctggccccaaatgataattctttctttctttctttctttctttttttctttctttcttttctttcctttcctttcccctcctcctcctctttgtttttagagacagggtttctctgtataacagccctagttgtcctggaactaacactatagaccagactggccttgaactcagagatccacctgcctctgcctcccaaattatgggattaaaggagtgcaccaccaccacctggcttaccaaatggtaattctttttttgttgttgttgttgttgttttttttttctttcttctttttggtttttttgagacagggtttctctgtgtagctttggagcctattctggcactcgctctgaagcccaggctgacctcgaactcacagagatccacctgcctctgcctcctgagtgctgggattaaaggcatgcaccaccaacacccgcctcccaaatggtaattcttaaagtagattattttaggaaataaatgatcaagtgcctaatacaatatattcagtatagcactcagagtaataatgttttatcttctgtataggtgctttgctgtgtgtgtctgtgcaccatatatgtgcccaattctgaggaggcatcagatcctctggaactgagttacagatagttgtgagccaagaagcaggtgccgggaatagaacttgggtcttctggaagagcaagtagtgctcttcaccgatgagccatctctccagcctcacttaataaaaacttcaaaatagccgggcattggtggcacacgcctttaatcccagcactcaggaggcagaggcaagcggatctctgtgagttcgaggccaacctggtctacagatggagttccaggacaggctccaaaacaatacagagaaaccctgtctcaaaaaaaaaatttttttcaaaataatcccaacattgattaatggagatttatttaaataatatatgtatctactagtatactaaaatatacatatatatatatatatacattgatatattaagcattaaaattatattgaatgctcagtgtcaagtgcaggaaggctgggcatgcggtgcagcagggcaacatgcaaagcatgcaggaggatctgagttcaacatcaggacgaaaagggttaaaaatgaagaatggaagatggaacagaaagtcatccgttgactgacccacagaatggttctaaaggcaaacgtcgttagtggatgctaaagttagtgggcaaagtatgaaagagaaagtatttgtaaggggaaaaataataatttcacgtagaccttacattccctgctttaatcgggagatacattaaaacatcatcaatatgttaattatattaattttcaagtatctcatgattcactgatgtagggataggaacatttctgtggtcctcatgccaacaatgtggtataataacaaaaacaaactaacaaaaaaactcataccctccacataatcatggtaaaacatcaggcaatcaaaaatgacaggcaagcagggaacgcctttaatcccagcactcgggaggcagaggcaggcagatctctgtgagttcgagaccagcctagtctacaagagcaagttccaggacagcctccaaagccacagagaaaccctgtctccaaaaaccaatagatagatagatagatagatagatagatagatagatagatagatagaatgacaggcaaataattgcccagtactcttaaaagattaaatcaaaggaagtatcccagattggcagtcactaaggagacatagccagtaaatgcaacatgacgtcatggattgaacattaggccagaaactagataacaaaagggaagcagtacaatcctaataaggtatatatactaacatcactgactgactgaagccactatattacagtaatattgggtaaagtgtaaatagaaactgtatttttgcacgtgcgagtgcgcacgcgtgtgtgcgttcatgtacacatgtgcttgggagtacccatggagaccagaagaggttatcatatcccttcaagctacagttactggtatttataaacaacctgacatagatgcttggatccaaactcagaaagaccagtaagttctctctctctctctctctctctctctctctctctctctctcttcctctctcttctcttctcccccctctcgtgtgtgtgtgtgtgtgtgtgtgtgtgtgtgtgtattttgggttttttttgtttttttttaatttttttgagatagggtttctctgtgtaggcctctcctggaactcactctgtagaccaggtcggtcttgaagtcacagagatctgcctgcctctgcctctcaagtgtttgtattaaaggtgtgcatggtcaccaccacctggcttacttaataagtacttttaactgctgaaccatctctccagcccctttgcaactcttttgaaaattgaaatatgtcagggttggcaaaatggctcagttggctaggtgatgattgccaagactgatgacctgagtttgaccatcagacctaaagtggaagaaccatctctctcagccaggtggtggtggcgcacgcctttaatcccagcactcaggaggcagaggcaggctgatctctatgaggtcagggctagcctggtctacagagcaagttctaggacagccaaagttagacagagaagccctgtcttgaaaaaccaaaaaaaccaaaaccaaaaaaaactatagatctacatttatagacggaaacctgtccacaaaatgccaagagaaaagcaggtagtaatatgcttttaacatattttaacacaattttaatttaatttttaaagaaattttattaacatcaaatacacaaaaagaatgggctttattatgacattttatacatgtgataccagcactcggagacagaagcaagaaaatctcaagtttaaggctagcctgggctacattgtaagactttctcaaaataaataagaaagggaggggggaagagacaaaaaaaaagaaatgcctggaaaaataaatattgaaaggccttaaactatattcaacctaaagaaggaaactatagtggccagcattttttcccccaagacaggatttctctgtgtagccctggctgtcctagaactcactctatagaccaggctggcctataactcagaaatccaactgcctctgcctcctgagtgctgggattaaagatgtgtgccaccaccacacagcatcatttttttaaaggctgattgtgcaaaacaattttaaccagggctagcaagacaccttaatcaggtaaaggttcttgttgccaagctggatgagttgagctcaatcctaggaacccacatggtataagaaaaagaccaactcccacaatttgtcttcttaactctacaagcatatgtatgtgcacgtacacatgtgcagacatacagagtaaatacatacataaatatttatagagacaactgtaactgggaccagaaagaaaatcccttaagaagcagcatagaggtagctctgtaagacagctagctattaatctctcactaacagctctactggagacccaaggaggggattcattagcccacttcacaagacttcccccggcctcagccaaaggcatctgagcacagcagtaaaagcagcactttggagatccaacagtgcaaggctgccttgaaacatcaggccccacactcccatttaacccacagagaggttctcaggaagcagctagagggcaggctccatgcctctctctcagagaaacttttgctagacgctgtgcatcagtaaacttgtttgagtattctctggctctggtatctggtgatatatgacatccagtataacagatttcatgatgtagagatattcaatggaatacactgagctttatgattaactccttcattattatatcggtgcacatgtatgaaaactttcctagggcctacagtgtgcatttcccatccaagacaaaagagtaccaaaattctcttcagactctatagatgattcattcaatgtttaaaaactaatcaggctaaacatggtggcttacgcctgtaatcctagcactcaggaggattactacaagttatagggtgtctggtctatttatgaagttccagtccatcttgggctacagtgagacactgaatcaaaaataaaatagcaacaaaggaatgataacaccactcgggaatctgaggcaggaggatctctatgagttcaagtcagcttggtctaaaaagtgagttctaggacagcctggtctacacagtgaaaccccatctcaaaacaccaaaaccacaaaaaaaaaaaaaaaaaaaaaaaaaaaaaaaaacaaaaagggggaaagaacaaaaaggatgaaagttgaaatactttcacatacattatacacttgtaatccttacactcaggaggcagagacattgggatcttgagttcaaggctagcctggaaaaagaaatacttttataaacatgcagttcccacttactcctacttttccaaatgttttatttactcgtgtgtgtgtgtgtgtgtgtgtgtgtgtgtgtgtgtgtgtgtggtgtaggtcagaggacaatctgaaggagtcagttctctcctcccagcttgaacaaccccaggctgtcagacttggtccactgagacaccttgagagcccctacttattctttcaaaggagctttcctgctccttcccttccaccatcctgctgaggaaaagccagatatgtcatggccacatgagccgtaggcacagccacacagcatcggtaagtatggaggcaatcagaatcaactcgacaaacatcaaccagatgacctgggagggctgggatgcggcactggcacttaaagaaccagagctcctgcccaactgtcaacctcagtaactctagacactggccagtgagcagacatgggtaaatgctgcccaaattgagctgccatggtatgactgggcttccacatatactgacatggtatgactgggcttccacaaagttctagagaagggctccttaagcagcctgccatcctgaaggccaaatgcttcaaaggagccacctgtgccctgctggcttgacaccacacaaggagctagctccattaggcactaacaaacttaaaaagtaaaagttaagatgaacaagaacattataagacctaaaaaatattaagtgtggatgcctgtccctgtttgaaacaaccaccaaagaattaatcaaactgccagattctaacacatatgtataatgtgccaatactataaggctagaaaatgtttagttgttttttttcttttagtgtctcatgtagcttcagctggctaaaagaagtttaacaaaagactgaaaagaaaaagtaaaaactcagaacaaggggtatagttcagtggtagaacacttgtctaagatgagcaagtacctaggtctgaccacacacacacacacacacaaaaaccctacctatccatataacacaatactccacacataaatagttttgaactataactctaaatctttgttgttaagcttggatttgttttttttttaacattcattggggggcatatatttggaggtcagatgacaactatggagtcagttcttctccctctactctgtaagtattggggctaaaactcagattattaggcatgacagcaagcaaccacacctgctgagctatcatgtcagcccagttgtttctttgctttatttattttaatgtgtgtatcatatgaatgtatgtgtaacaggaccccagatcttaataggcatccagaccttagcacaactgactctatgatggcagtaccattcagactataaaactcagtacatagacagtattattttactacctgccaaaatgaaaacaaaggcctaatccatcaaagtctatagttctgggaaagtctctaaatatactaaccttgcttttttacttcttagtttcaattctggttaactgttcttgttaatccagaatgcggtttttaggcttacaagctcaccctaaggaaggctagggtctatcctgggatccttaacacccagtatagtcaccagctaaacatatgccaagcaaactggccctcaagattccagagattctctgatctatgcttcccatcacccagtaagattaccagaattgtatatgcttacacaatgcatgttgtagaatattattttaagacatgttacattcatttatgctgtggaacatttgtttaatgatacattcttttatgttgcatttgtttaactctatgaagattgttactttgcctgtctaaaacacctgattagtctaataaagagctgaacagccaatagtgaggcaggagaaaggataggcggggctggaaggcagaaagaataaacagaaggaaaaaaagaaggatcgggaagcaagatgggttaagaagtgagaaaagggggccaatcacccagccagccaccaagtaagattgaaaataagattacggaagtaagaaaaggaaaaagcccagaggcaaaatgtaaatgggataatttaagaaaagctggctttaaacaagccaagctaaggccaggcattcatgagtaataagttcccatgtgtattaatttgggagctgggtggtgggctcccaaaagagtcaagcagtaaaaaacaaccaactacactatgcatgcagcttttacctggattataggatcaggtctttgcttgcatggcaagcacttgtactcaccaagccatttccctagccctaggtttttgttgttgtttggttgttttgttttggtttggtttttttgtggtggcagtggtagttttgttttttgtttggattttggtttttgagacagggtttctctgtgggatggtcctggctgtcctggaacttgatttgtagaccaagctggcctcccaggtactgggattaaaggtttgcaccaccactgcctggtttgttcttgtttttttaagaaaggtctcattctgtagctcaggctggactacaactggtggcctcttgcctcagctttcatgtgttagactgtagatctgagacatcattatcatctacctatgaaagaacaaataacaccctaacttaaaacccatcagttaggctgcaaaccagcccaattggtagagggcttacctagtatgcaagaaatccagggttcaatgtcaagcaccacataaaaccaaacctgtaatcctagcacctgggagatggtggtaagcaggtcagaacctcaaagtaatcctcaattacacgagttccaagccagcctagaacacatgagactcactctcaaaacaacagcttttccttgtggtctctgctttagtttctgcctcaggctcctacctcagctttccctgataatggattgtaacctgtaaaccaaataactctttccccaccaagtcagctttggtcagtattttatcacacagcagaaaggagatcagtacatcttttctcaaaaattaggtggaacacaatcaaggaagacacctacagcaaatctggtctacacacacctgcacatacattgtgtacatacacagtgtctaaataaataagccatattacagtcaaccaaagtctatgaggatactgggccctttatccaaagagctggtgactcaaaaatctcaaaatgtcatgtaaaaccaaaatggttcccactttactttcattttgtttctctgtgtcgccttagatgtcctaaaacttgctttgtagaccagggtgacctcaaactcaagagatccacctgactctgcctcccaagtgctgggaataagggcatgcaccaccacatctggccctatttcatgatttttaaatgcataacatttagagtttaatataatcgcctgcttgtttctttggttttgagacaacatcttattctatagcccaagctggtctggaactcactatatagcccattctgccctcgaactcctaatgaatcccctacctcagtctctaaatgctagaattaccacaatgagacaccatgcctggcacaattacctgcttttaaatccaccccacttgacttgtaaatataagtgacagatactatatcctctctttaaaatgaactagcaactaccctttgttaacacaatccaaatgctttatcactactgtgaaagaaaactgacctccaaagagagtggcactattaggtgtggccttgtaggaggaaatgcatcactgtgggggtgggctctgaggtttcctttgcacaagccactcccagtaacacagtctacttcctgctgcctgcatatctccttgtaccagctccttctccagcatcgtgtctgcctgcacagcaccattatagttatggactgaacctctgaaactgtaagctgccacctcaattaaatgttttccttggtaagatctgctgtggtcatggtgtctcttcacagcaacagaaaccctaactaagacaactaccaaatctctctagtcttgatactgaccctaagctgtggaaatcaacctctggatgtcacactactaacatgtatgccacagacttattgccctatcatttctgactcacatactcagtcaactcagtcagtgtcaccacagttctagtacctaaacccaagttctcagaaatgatgttttggctttactgagctaagcttcaacatggattatctcatttagtgtcctgtttcacagacaagaagtcacaaaggaagtaaatggcagagaaacactcaaatccttcctacgattctagaaatcatatacaatgctgactcatctttaaattcttctaccttttaccctgtaaatcacagagctcatgctttcatttcttccccatcattcaacagtaactacacacctgttctatgccaggcaccaaggaatttaggcataaatcaaatagttcttctagaagctcataatactacaggaagaccagatctaaacgaataattgttatataaggtgagaatttgtggtgatatattgtttatgatttaataaagccactggaaatcaaaatacaaagctatccacagccatagagccaggcagtggtgatatacacctttaatcctaacagtcatactagctagccatagaggccaggcagtgatgatacacacctttaatcccaggactcaggagacagaggtagatggatcttagtgagtccaagaccaccctggactatacaaaagtatatcagtctaaaagaataataaagctcatacctttaatccccgcactagggaggtataaaaggaagaagcaaagggtctcgtgtgggatttagtttccagatggagagcattcattgcactctgaggattcctggagacaggattgccatttcagctgggtagaggtaaaagctactggcttggctgctttgcttttctggtctttagcttgaactccaatatctgtctctgggtttttattaatcatgttataagaaatactgtttgccgggcgttggtggcgcacgcctataatcccagcactctggaggcagaggcaggtggatctctgtgagttcgagaccagcgtggtctacaagagctagttccaggacagcctccaaagccacagagaaaccctgtctcgaaaaaaaaaaaaaaaaatactgtttgatttttgctttttagacacagtctcactgtgtagctctgctgaccttgaattctataaggagcttacattggtttcaaacttgggatgtctctgtctcagactcctaggtgctgggattacagacacagccaccatgtccagttcatagaaatagtcttaatacaggcatgtatgaggttctgagattgtagaggaagaataaatgaaaaaaaagggggggggttcatgacagcaagtgaaatcaagacactggtattaaagtttgagaataaagttagatgtggtgggccacacctatagtcccagcaattaaaggcccaggagagatcctgtttcaaaaccaaacaataagagacgtgtaaggctacaaaggactcttctaaggtgctggtatttttgatctggattatccatgtgtatgtggttcataaaaattcactaagctctgtccacacttacatgtgctttatatgtataatgtacttcagttcttgttttgtttaaagacctaaacttgatctggaaagatggttcagtgggtaagggcacttgatatgcaagcaagaaaatctgaattcaaatcccccacacccacgtcaaacaaacaaaaaaaaggtcatagtcacagatgcctataactccagcattgaaaggatggggacaggaagaaacccggagctcctggtcatacagcccagtggaaaaagcttcagagagaccctgtctcagagaattaagggtagaatgatacagaaagacatccaacatcctcctttagcttctgaacatatgccacaagcacatacaacccctccccccacacacaagtaataatgctaaatttttttttttttaattaaactgtagccctgacataacccacagatcttctcaactctggatatttcaaatcctcaggtatttcttgatcctctttgccttctgcaacctggaactcccccctttccttatcttttccaaactctagtccttcgttagtccattctggaaaatgaaataccgtttactcagggtcaggaaattattacaaaaacttcttcgtctcctctactggcctgtgactccttcagcccaatgtctgtgtcttgttggagggaataatatgcaataaggtttgatgaaaaacacatgcacacatatattaacaagtcagaaactaagaaaaacttcacgagagtctcagattgggcagaaatgacttcagtacagatacctttcttgcaaaggggctggttcccttggccctccttaccccctccactatcggtggaacaccgcctgcaatcccgctgccaaaccctacgactccacaggaaagaatgcacacagcaccttcggatgtccatccttccgcggatcccgctccccgagtcgggatggtgggacacgccccctcggatacccacccctcgggtagcggggctcacgctccacaccttctctacaccccgtcctccgcaccatagctccgccctcagctcgcggaggaccccaggcgcgggtcggactcctcagaaccgcgcacttgtgcccgctgcctcagcctccgattcaattcactgaggctgggcggtgcagaccggcctactccagccggcggcctcacctctcttccaagagctcagtggggacaccacctcaaccctctcggaaatgaactcagccagactggagcgaaacaaggccgccctcacggtcacggccaccacaagcacaagggccaagggagccgccatgataactgaggcgggcacacaggcggggagggcaaaaggcaatgcggaagagcctcaagacctgcgcgccacactgtagtacctcggtcgagcgagtgcggctactgctgccggagcccgccggccagaagactaccactcccagaaagtcttgcggcagggcgacggaaagcgggatatgtcaaacttgtagcaaaggtttggactacgcctccgctcacccaagagaagtgaaaaatattggactcatttttactgagaacgtgagcttaacgttgaagaaataatttcactcttgtgcatatttttaatgttaaaatgtttacctttatattttttaaagagtgcgacgtgtgtatttattgaacgccaactaccctccaggctctatattgtgtactgaggaaacactttggagtggttaatatttagctttgcgaccttcagcaagttatttaaccgagtgaagtcagagcaggaactcaagacaggtcatgaagctaaaaccgtggagaacgctgcttctggaccttctcttctgctcatgcctgggcgctttcttgtaccacacaagcacacctgcccagggatgatgcccacctacagtgacctgggccctcccacttgagtcaatttctcacagaccagtctgatggaggcaattgtttgactgaggtttcctccttccagatgacccgaggttgtgtaaagttgacaaaaaacaaccaaaacaactaactactctagtaaatcccatgccatgatgtgcttctgctctttctcaatttcggttggtagcgtgtagcgtgaaatccctccaggtgggagtgtttacatctttgaaatcagcaaacaccacaaatcaggggtttggagagccccttgataagcattaacggaatacctcttcattagttaatgtattaaaagtgctaaggcgagtgcttaaagattagctataatgattaattatacaggagattttagaaccatgaagaaaatggaacagtgcatcaatagtataactatggttaacaaaaattagtgcatatttcaaaatagtagcagaggcttttgagtgttcctacacaagtaaagtctgaagtcatatgccagttaacctatatgactattatacattgtacacatgtattgggttatcctactgtaccccataaatatgtaaactgtttcagttaaagataaaaaaaaattgctgggaggtggtggcacatgcctttagtcccagcactctggaggcagaggcaggcagatctctgatctacaacagctagttccagcacagcctccaaagctacagagaaaccctgtctcgaaacccccaaaaaaattttaaagaaaaagtgcatgattgagattccctctatggctggaggaatggtggtaacataacaagctggtcagggaagactggacaagctgacatttcagatgagtactagaggaagagaaactaatcatagctagaacaggcaacagactccggaaccatgaggatcaaaaaagagggttggagagctggcccagccactaaagtctaggatcacaacctagactaggggagcagcaaagaaacaagtccaagggaggagaacagcatttgttttgaaaggagaaacacataatgaggcaagcaggggcctcttggctgtagttaacaagctggaagttattcaaagtacaagctatgtgccattggaaagtttttattttttttgttttttgttggccattgaaaagttttatttctttttattttcaattattttggtttccagggactggcacttatgtagcccaggcaggccttgaattcactgtgtatcaaagatacaactgatcttcctgtctttgactcctgaatgctgaaattatagaattgtgtcactgcttctggacgttttttaaagtatttaccttatttgcattggtgttttgcctgcatgtatgtctgtgtaagggtgccaagatcttggagttacagacagttgtgagctgccatgtggctgctggacctgaacttggatcccctggatgatctcagtgctctcaaccactgagccgtccctccagcccctcctgaccttttttgtatttttgtattttgagatggggtcttgccagacctggcaatctgtataggattttaagtggcctcaaatcaatggcaatccttgttttagagatttttattttatttttggtggcataggggaggcgatgaagtacatgtcaaggtcagaggctttccacctctgcctcccaagtgctgggccaaagcatgccctgctacacccagcttccactggagagtgttaaccagagtggtatcagatgcttttattcgtggactttttgagggatgggggcgtgtttcctttgatgctagggatgaaacccaaggtcctggtgcatgctaaacacttgcactgcaactcactttccaggtgtgtgtctaaaagatcactatgttcccaagcctatttcggtgttagagaatatgatgtgatgacaaaaattataccctctacctttatgggactggaagagttggttgagactatatagatcttaagaatgacataagtcaggctggagaggtggctcagtggttaaaagcacataccactcttccgggaagatctgagttcaagtcccaacgccaagtgactcacattgtaactccagctccaggggatctgatgtctcctgtgtatgtacccacacagagattattaatgcagaccagtcattaaaaaataaaacaaatcttgttttgatttgtttttttttcaagacgggatttctctccgtagtcctggttgtcctggaattagctctgtagaccaggctggcttcaaattcagagagctttccctaactctgcctcctaagtgctggaattaaagatgtgctccaccagttctggcaaaacaaatctttcaataattaatattaagtcataaacaatgattagagggagatcagtatgtcaggaaaatgtaaaaatcagctccaggagtcatatctaaggaacgggggagagggtggtgaggtcacaaaggaacagaggaggacactcttctttgagtccaagccctgtgacatactctttgcatgagcttatttagtttacatttttcttcctaaaaatacagatgttggtatatgcatattgcattatgaaaattggaagctgaagtagcatcaactccatagtaagactgaaaagactgtacacagtaaaaggtttagcacatatatctagtgtctgacacacaccagacagctgctgtgttagttacaccctctttttttaatgttttaaatttttattattttacgcatatgggtgttttgtctgtgcatcttgtatatgcagtacctgcagagggcagaacatggtgttggatcccttggaaatagagttatccacagttatgagtgaccatgtgggtactgggaattgaacctgggtcctctgggagagcagctagtgctcttaactgctgaggcatctctaaggctcccagttacatcattttaatagataatttaaaagttcagctgggcgatagtggcacacgcctttaatcccagcactctggaggcagaggcagatggatcactgtgagttcgagactagccggtctacaagagctagttccaggacagcctccaaagccatggagaaaccctgtctcgaaaaaacaaacaaacaaacaaacaaacaaaaaattcttgccgggcattggtgacacatgcctttaaccccagcactctttgggaggcagaggcagatggatctctgtgactttaaggccagcctggtctagagttccagaacaggctccaaagcaatacagagtagccctgtctcgaaaaacaatcaaacagcaaaaaaagtaggattgtctctggggagacaatgaccatgataaatggaagtgagatccaaaccaataattctgaatcatggttatctaatatatcactttgtaaaggcttgcaagaactaaaactcagaagaaaacagactaaattttcacaaaccatagttaaacaatggtttctttactacctcactaaatatgtgggcaacaagagaagaaataatttggctcttgcattaacttttcgtggggagaggagaacaaacatgtaggtgcccatgagaggcacctacaacagaacaaagaaacagttgcatccaggtctagcttcatgaaccaatgagtttaaagggtttacttagagatggataaacaaaaaggtcctatatctatacaatagaacataggtaggcaataagaaataatgaagttttgagatatgccacaacatgcaagagccttgaaaatatgctaagtgaaacaaaccagatcacaaaacatatgtcttttaattccatttatatgaaatgttcagaataggcaagtatacagaagaaaaacttaagacttgaggtagctaagagaataagaaaaggtacaatttcttctacttctcttccttctgtggtattggggattaaacccacagtatttcctttctcatgctgagcaagcactctaccactgagatgtatgccagcattatttttcttcttctctcctccctcttcttcctccttcttgttcccctccctctcctcctacccctttctcttcctccattcattcttccttcttttaggctgctctggcctcaaactcactttttagccaaagatggccttgcactttgaatccttctgctaacacaacctaagtgtaggcagtacgtgtgtgagctaccgtgccccattgatgttgtgctgaggtcagacccaggccttcagcatgctaaatgcagtctgtcgactgatctacattcctagtcttgccttcttttccatggcgtgtgtgtgtgtgtgtgtgtgtgtgtgtgtgtgtgtgtgtgtgtgtgtgtgtcttttctctgttctcacatctnnnnnnnnnnnnnnnnnnnnnnnnnnnnnnnnnnnnnnnnnnnnnnnnnnnnnnnnnnnnnnnnnnnnnnnnnnnnnnnnnnnnnnnnnnnnnnnnnnnnnnnnnnnnnnnnnnnnnnnnnnnnnnnnnnnnnnnnnnnnnnnnnnnnnnnnnnnnnnnnnnnnnnnnnnnnnnnnnnnnnnnnnnnnnnnnnnnnnnnnnnnnnnnnnnnnnnnnnnnnnnnnnnnnnnnnnnnnnnnnnnnnnnnnnnnnnnnnnnnnnnnnnnnnnnnnnnnnnnnnnnnnnnnnnnnnnnnnnnnnnnnnnnnnnnnnnnnnnnnnnnnnnnnnnnnnnnnnnnnnnnnnnnnnnnnnnnnnnnnnnnnnnnnnnnnnnnnnnnnnnnnnnnnnnnnnnnnnnnnnnnnnnnnnnnnnnnnnnnnnnnnnnnnnnnnnnnnnnnnnnnnnnnnnnnnnnnnnnnnnnnnnnnnnnnnnnnnnnnnnnnnnnnnnnnnnnnnnnnnnnnnnnnnnnnnnnnnnnnnnnnnnnnnnnnnnnnnnnnnnnnnnnnnnnnnnnnnnnnnnnnnnnnnnnnnnnnnnnnnnnnnnnnnnnnnnnnnnnnnnnnnnnnnnnnnnnnnnngtgtgtgtgtgtgtgtgtgtgtgtgtgtgtgtctctgtgtgtgtgtgtgtgtgtgtgtgtgtgtgtgtgtgtgtgtgtgttttagaagcagcctcctcctatgtggccctgacgactgggtacccactatgtagtccaggctagcctagaacttgcaacaatcctcccgcttcagcctcctgtgacatctacttttattttaagacaaattgcccaggttggccttgaactttaaatcctcctgtctgtcttcttcccagaagccgggattacagagctgtaccaccaggtaaagtatcgtaacacagcttctttgcaaagtagtcaaaatgttctaaatttacgttgtagtgatggttctgctggtctgtgagtgtgactgaaagatcactcagctgaatcaggtctctccctctgccatgtgggagccatctcaggtagtcaggcatggcatcaggcccataccttttgagccatctcactggccccagaatgtatttttttttttaatgtaaactcctccagtctgccctaaaaactgtgattcaccatgctaaactgcatcccttattacttcaggaaattctgatgtcgctgactcagactccataccttgaaaaatgtcatgttgaaaagcatacatgcccagtagcctatgcaccaaaagagtgaaaagaggaataagttagcaaatagtgcttacaaggggccacggactctaagtgttccatatgtatatacactgttatagctgctgttgtgtccccatcactatatgaggaaactgaggtataaagggacttagtaatttgcccaaagtcatatggcaggtggcataaccaggatgtttacgtaagctctaaatattatagctagttgctctgcctgagaaaatgagaggaatttggtttgggttgggttgaggtggtttgggttgttttgtagttgtagctgaagaagaagggtatttaacaaaaaggaagttataaatgatgattccttgtggatggttttttttttgtcccaccagcctgctcccaaaataatcacacagagacttattattaattataaaaattcaggcagctgggcgttggtggcgcacgcctttaatcccagcactcgggaggcagaggcaggcgaatctctgtgagttcgagactagcctggtctacaagagctagttccaggacagcctccaaagccacagagaaaccctgtctcgaaaaacaaaacaaaacaaaacaaaacaaaaattcaggcaatagcttaggcttgttactcactatgagtatgcaacaagggaggtccatatggttggagttatggaagcaagaggaaaaactggggaagcaggtaagagtcagatagcctttggggaccatgatgttaggttgaattcttatcctaaaaagaacaagaaatccatgaaagagggagagtttccagttagaacatcatcacaaattagattttttgtgggggtggacaggttctcttgcagtcttgggtgccttaaactcaatatgcggctgaggatggccttgaacatttgatcttgtctcaaccttctaagtactaggattacagacataggtatcacatgccccatttaaacagtgctggggacctagctcagtgcttcttgcattatgagcaaacattctacctatatctccagcccccgaacttagggttttttgtttgtttgagatggggtttctctctgtgtgtagctttggctgtcctggaacttgctctgtagatcaggctggtctggaactcacagagatccatcaagctgcctctgcttcttgagtgctgggattaatggcatgtgccatcaccactcagcctcaaatttagattttttaaaaccattcttctgctccttcatcctctttatttacttagaggcatggtgacacacacctttaatcctaggctcaggaggcagaggcaggtacatctctgtgagttccaggccaactaagagtacccagtgagactctgtcttacaaaacaaaacaaaacaaaaaaaacacaacaaaacaacaaacaaagccaggtggcgatggcacacacatttaataccagcactcagaagcatcaggatgaatctctgagtttgaggctagcatgttctatagagtaagtctcaggacagccaggactacacagagaaatcctgtctcgaaagatcaaaaataaacaaagcattaaattaaaattttaaaggcagaggtcagttaagaaagaaacctggttttgacctttgcacttcacacaggtacaaacacgcaaacacaaacacacacacatacacaaaaaggtaagtcagagctacaatttcaaattgagtacatttaaaaaagtgtgtgtgtgtatgtgtgtgtgtgttgcctgcatgtatgtttgtgcaccagggtgtgcctggtgcccctggaggccagaagagtgtgtcagatatgctgggactggagttacagagatttgtgaactgatgctagggatcgagcctgggtccactggaataacagccagggctcttaactgaagagccatcactccagcccctatataaaaattttaaacataactagaaactgctgtgcaacaatctttatacaatgtaaatatgtattactctcactggttaataaagagctgactggcccatatctgggcaggaagagattgggcaggagagccagagtaggagaatgctgggaagaagaagggggagtgagaagagcatggagaagatgcagagagaagcaagatgtacacgctgtactgagagaaggtaccaagccacatggcaaagcgtggataaaaagaggggttcactgttagctaggaacaagcctgagatactggctgagcatttataataaatattaagcctatgtgtggttacttgggagcagcttgtggaactgttacaagaaacttctgacaacaagaaactatttttccagctacctgataaccagctaccattatgaacggcagaataaccagctaggatgttcatgagattccaactgacaattttattaggaaaataagaccaagatataaatgaggtctaaaatccatatatttcacacaagtacccatagaaatcaatagaagctagccagaagtttcataaaggtaaatcaaaatttacaagaacacatcagatttgaagaccactttgctaatggcaaaagaagctttgacattaacttgaaaggtggcgcatgtctgtaattccagcatttgggaggtagaggcagaagcatcatgaatttagagccagcgtgaactacacatatagaccctgtctcaaaaacaacagaaagttaacaactccttgaatttacgcagagaaatcaacccaaacatagactttccagatacacctgaatggagaggaaagagctcaaaaaaaaaaaaaatcaccaaaagaaacactaataacgattactagaggctgtagacagatttttctttggggccaccagctcacaaaaaaaaaaaaaaaaaaaaaaaaaaaaaaaaaaaaaaaaaacctaaaatggatgcttggtattaattaagcatggtgctggcagccagctccagccagcaggcaacagctggtagctgcacctctatctgccacccagcaccagaccacctgagagactgcaggattaggaagctacatctgactccttgttcagtcagaactttccttacccccccccctctatttgaacccccacaatggacaccatatgtagatggatttttttcactgagccaacagctcacaaaacaacaacaacaacaaaaaacagagacttattctgaaagctcagcctatagcttaaggcttatcccactagctcttataacttaaattaacccatttatatcactctaagttctgccccctggctttttacctctcttccatctttcacctctccatgttctgacatctctcccttgcctagattcctctcctgtctttctccctgggcctgaagtcctgcccaacctcttcctgcctagctattggccattcagctctttattaaaccaatgagaaggcaacttggcaaagacacatcttcatagattattccacaagaggtcaggttgggcaacatgaggtcaagtacatcatggcagaagacaggcttgctatgaaggaagtcttggcttgatctatagcgaccatgttgttttaccaggaggaaatgaactctaataacttgaaaatgaacagtacaaacaatatcagagagggaggggaactgtgggaagtaactgtgggggaagacaatccaagggatcctggagatttactaaagaggaaggaccctaacctagtcctatgtatggattggaaaactggagcccagagagaggcagtgccaggtgcaggaacacacagcaaatcagtgtggattcagacccaaacaccagggtctcaccatcagcctcctataatgtcagcctccttttcctgggtcagggtctctgcgaggcttactagaacacacacaactagttctctcctcaatcctccacccaaatgttgtaagccctcctcctcgtcccccccccaaaaaaaaaaagaagaatggaggatctggacttacaggcttatgtaattcctcaggacagatttcagagacccaatgtccacagatctaccaatttccttcctacactgtacccacaaatgccacaattacaaaagtcatcctgttaggaaaacaacactaagatatgactatggctaaaaaccaaagctgtggcttcattcctttatcccccagcctcctgtattggaacctctgtcctcttcctaagaggctatgaacccaggctctgtgccccaaatatacacaccttctctgctctgggaaaggaggtacatatcccttgtctttgttgttctctgatatctatacccccacccctgttttctcttcctagcaagaccttgaattcctcagccctcattccaggaataggtcttaaatcatttaaactaagaaatgcatgcttgctatggaacaatgtttgtacactgtaaatatgtattactctcattggttaataaagagctgactggcttatagctgggcaggaagagattgggcaggagaaccagactaggaggacactgggaagaagaagggctgagtctgaggggtaatgagccagatatgtagaaaaagacgtaacaagtcatgagccatgtgatagaacttagataagaaatatgggctagctaatttaaattgtaagagctagttagtaacaagcctaatctatcggctggtcgtttataatatgaagtctctgtggggttatttgggagctgaccagtggtccagacaaaaaaaaaactctgcctatacatgctaaaactcttaccatatcatggcattatcatgactagctgaaggatgaacgtgtgacccacatcaggctatttagagccaacaaaactcaattctgagattttggatgagccatttgggaaaatagatttaccattttcctttgggtttaagtttagaatgcacctacacctaagagcagctggcaacttcttgccaatcttatccatgctcagaaggcaaggccaaagcctgaatggttctactaagatatagtgaggtgaggcatcttccatgtaaacagtttgtgatctgcacagacagcaagcacatgccaagcccttataatcctgtcctacacacctaaaaggttgacactgacacacagaattaaacaattgccctgtgagttaggaggtggatactctgtcactaggagccaattccacatggcagctaagttacacattctcagctgcatcctgaacagaccgagagggatgggggtggggtgggggtggggagggcagaaaccacctctgcctgaggatggaaagatgactcagctgttgagtgcttcctgctcttccagaggacctgactttggttcccagcactgtcaggcagctcacaactgcaactcagacttcaggggatctaagacacacagacacagacacacagacacacagacacacacagacacacaggtgctgagaattgaacccaattgaaccaatgttcttaactgctaagccatcttttcagtccctttttaaattcaaaatctaagccaggcggtggtggcacacgacattaatcccagcactcgggaggcagaggcaggtggatctctgtgagttcaagaccagcctggtctacaagagctagttccaggatagcctccaaagccacagagaaaccctgtctcgaaaaaccaaaaaaaaaaaaaaaaaaaaaaaaaaaaaaggaaaatctaaaaaaagataatcctatgcttcaacagattctgggaagccacagaatggtctcctgtcagcctcccaggggagaccaggggccaggggagaaggattttcctgtctgacaagcctcctcatgctctggggcagccacaaggcattctgccaagagccagatgaactattcacgccttaggccttcaacctttccagatttatctggggttttagttccaactcccaacttttcttaagttcaaatgtctgttaaaagcccaagttgtttgttaaggggttagttgtgtgttcaaaagaatgctgtgtttttgtttccagcatttccgtgtgttatgtagcaaggagttccagatattgtcagcagaggaagtctagcttgatgctgagtaaactctccatcgtcactgtctgtttacttttttctctgtgagtatcaagctctgggagggcagggactcagctgactcatctctggggacaccagctcaagacctgagacaaagtaaatattgattctaaacttccacttggatacctctagtgatgggagctcatgggcaatgagggactaccttctcctcagccatgtgcatcttttcctgctcaagtgtccgtcctgattgtgcagaagggacaggagtcaagtaatgactgagcattggctgagaaggaagtgcacaggccaggtctgggtgtaaacctgaggcactgactcattgctggcagaagtctaaagatggcacggatatatagcagggtggtggtggtgcacagctttaatcccaacactcaggaggcagaggcaggtggatctctgagttcgaggatagcctggtctacagagggattttcaggatggtcagggtcacacaaagaaaccctgtcttgaaaaacaaaacaaaacaaaaatagttgaaatgtgtatagcaatcaatcttatatatctgaagtatctctgaatctatttttttaaaacaggttttcttgtagctcatcatgagttcaaactagctttgcagctaaagatgccttcagctcctttgccatgactggtttcatgttgggattaaagctggaggctgaacccaggatttagtgcatgctaggcaagtactctaccaacagagctaccttttcagtcctattctaaacagaaatacctattctaaaacagaactacctattctttagtcctattataaacagaggtagttcttatagcattgtctgtggaggcaacagggaaaacccaagtgctcaacaacagtgactaaagaaatggttttgtttttatctttttttttgggggggggtcttctttaatgaggtagagtttgagtatcgacatggtacaacttccagacagtataaatcaatacatcatgcaaggtatgtactaatgtctttaatatttgtatttgggtttttatctttttttccatttattgtgtgttcagacatgaacatcatagcactcatgtggaagtcagaggaaaacttggggtgttggtgatctctttctgtcatgaggatcctgaggattgaattcaggttgttaggtgtggcagcagctgacatctctcactggccctaattttgattttttgaggcaaggtcccatgtagcctgacttcaaagtttcaaagtagcaaagaatagccttgaactcctgatcctcctgcctccacatctcaagtgctgtcattacaggcctgtgccatcacacctggctaccctcaattttaaaaatggcaattaagccgggcgttggtggcgaacgcctttaatcccagcactctggaggcagaggcaggcggatctctgtgagttcgaggccagcctggtctacacagtgagttccaggaccgcctccaaagcaatacagagaaaccctatattgaaaaaacaaacaaaaaattgcctcaactgtttagatctcattagaaaataccttaaaatatttaagcttggcatggcaacacatgaatttaagcccagcacttgggagacagagacaggtagatctctctgagtttgagcctggtccacataatgagacctgttttggtttggtttttggttttttgagacagggtttctctgtgtaacacccttggctgtcctgagctcactttgtagaccaggctagtcttgaactcacagagatccacctgcctctgcctcccaagtactgggattaaaggtgtgcgccaccaccacctggcagaattacagtggtttttaataaactattgagagcaaccttcatttccattgaaaactagccacagtacattgatatgattggatattacacgtgtgaaataaaacaaagcttccttgcacacagttaatgaacagtctcaagatacagtataagggctggagagatggctcagaggttcagagcactgactgctcttccagaggtccagaatgcaattcccagcaaccacgtggtggctaacaaccatctataatgtgatctggtaccctcttctagtgtgcaggcatacatgcaggcagaacacttatacataataaatatttttttaaaaaaagatacagtataaaacgaacaaaggggcataaagcagttttatttgtatggataccacacacatgcatgaggacctagggatgtggctcagttgctagagtgtatgcctataaaatgagtgtgatatcagaagcctctaatcccagctctcaagatggggaaacaagaacagaaatgttaggtcatccttgctacacagctcgagatcagggctggagagatggtgtgccgattatgagtattcattgctcttgtggttgccggtatccacatctggcagctcacaactgcctgttgtcaccagggatcgccagttccccaggaaatgacagagactcattatgaaagcttggccaataggttaggcttatttctaactagttcttatacttaaactaatgcatttctattaatctacatctggctgtgtgactcttggcagctgcctctcctcctgcacgtcctgcttcctctgcctctggctggtgactctgtcatcctcttcctagcattctctctgccccccaaatcctgcctagctattggccgttcagctttttatttatttatttatttatttttgtttttcgagacagggtttctctgtgcagctttggagcctatcctggcacttgctctggagaccaggctggcctcgaactcacagagatccgcctgcctctgccttccgcgtgctgggattaaaggcgtgcgccaccaactcccagctttcagcattaagttttttttttttggttcagctttttattaaaccaatctgagtgatacatcttcacagtgtacaacagtattattccacaacagcctgtaactgcagcgctaggggaatccagcgccctctactggtgtctctgtgcaccttcactgatgtgcacagacacacacataattattaaaacacgttaaagtaaaaatctttaaaaagcaaaacagtggccctgactatatcttggttgaattttacatttatattttaaaatcatgtaatttttatacagaatattaaattgttgcattgtttaatatctattttaatcaataatagggacttcaggtggcaacagagtgacgccaactctccttcacagaaaggattcatgtttcacttggttccaccagccttcccaaggacactgggcttagagataggcacttgggctataaaacatcattcccagcagtttctcctatcacctctcacccatttggcttcctgtcaccactgggctgaggactgattataggggttgtatttccagaggtcccatcaatagaaggctgagaagagccagtccaggaaaaatgcgacatttggctttacttctttgttcttccagccacacttttactggctccacctccaacgtatgtttctctctgggtccattcatcggaggcatctgaaaactccattggactagatagaaagggagttagcattccattgtttcaactattattgtaagcgatatctaaaaggagcaatggtttactaagggagatacaacaacactgaactatggtgtattaagaagcaaaaaagactttacttttattctggagtccgattaataggcaacagtgaataatgcttaagaccaggccagatcggtagagtcataccctacccagtctgtcactcagcagctgccaaaacttagacaaaccttgtgcctcagtttcccagtttgtaagagataaaagtagcttcatcatagggttattgtgaagctacattggaatatcacatcaagtgtttgtgggtgtgtggatgtatgcatatgagtggctgcacctgtgtgtgggtacacatgtcataggtggacatatgtattcatcctatgtgtggtcctcacctccctttgtgatcacacatctatctacctttgcacaactgaagacctactttctgtcagtgtatataatttttgtctattctagaatttcatataaatgcagttgtacaatgtcttttttgttttgttttgttttttcttcttttttaaaaaaagatttgtttatttattacgtatacaacattctgcttccatgtatatctgcacaccagcagagggcaccagatcttataacggatggttgtgagccaccatgtggttgctgggaattgaactcaggacctttggaagagcagtcagtgttcttaacctctgaaccatctctccagtcttgagtttttttgttttgttttgttttgttttttgttttttctagacagggtttctctgtggctgtcctggaactagctcttgtagaccaggctagtcttgaactcacagagatccacctgcctctgcctcctgagtgctgggattaaaggtatgcgccaccaccgcccggctacaatatgtcatttttatgtctggcttctactcagcatgttttttagattcgtctcaatttgtggcaagcattagaaggctcttttttattgctgagtaggggtctattgcacaaatacatcacagttctggcttgatattgagagtataaaggttgatggagtttcaattctagggagagatggtagagagacacaaactgaattaaaccccccgcccattcttccttccctctcctttcctgtacataaggaaccagaagacttctaaataactttctcatgcatcctcagtgttttaagcttctcttctaaaggaaggctcacaggatggggctggagaggcggctcagcagtcaggagcactgggtgctcttaggagtctcacattcagtctctagcatccccatagtgctcacagcccttatgtaaattttgagaactccacaggcaccaggcacacatgtggtgtgcagacattcaagcaaaacactcagactttctaggcccatttcatccatattccctccccttgtctgcagtcacctttctatttgagcccagctttggcctttcaccacagcctgctttctgaggctcttggaacccacccggcaccctcctcccggtctgatcccagctaagaatctatcaccagagctttggggagaaaatccagggacacaggttctgaatactgtgcaaatattgaccaatccaccctagaccttgcttattgtcttccagcttgtctggttttctgaattctgtcatttcttcccactagaggaacccagtctattctaaattcaaagaggctgacttttacctatgagccttaataagtctccaagtcattatttgtgacctggtggtccaaacaagaaaatttgtccacagtgggacaagactgtaatcctagctactcaggaaactgaggcaagaggcatgaaagttcaagactagcctaggcaacttaaaaaacgctgtcttctaaaaaaaaaaaaattcaaggggcaggagagatagcccagcagctaagagcccattctgttcttccagaggacctgagttcagttctcatcatccacataagatggtgtacaactgcctataactccagccccaagggatccaacaggcctccatggacatcaggcatgcatgcggcacacctttacacacacacacacacacacacacacacacacacacacacacacaccttaaaaatacatttcaaaatgtatgtgtggtacactaccacttgtgtttaaagtgaggtgattctctctctctctctctctctctctctctctctctctctctctctctgatccatgtgcagccctgaaaccatctcactccctggaagcagtgcacgtcacctgggacacaggggaagcatggcaagcccctcctgctctcatgctggggggtggctttttgtttttgtttttgcctctgcctcccgagtgcttggattaaaggtgtgcaccacgacctcaccatcatttacttgtgcatgtttgtatatgcagaggatatttctgccccgtctcaccagggactggtaagggcagttttctctgacaagtggtggtggagggaagtaaacctatcccttttgttctttgaccttttgaatcattggtagcctattttgtttatttagaatcagtgtctcatagagcccaggccaacctcaaacaccctatgtagctgaggatgaccttaaattacacatctttctgccagatccatctcccaaatgctggaagtgcaggtgtgcgccaccacagcgggtctcaaaaactgtttttattcaaaccaaagattgagcatcctctgagtgtaggatggtactcactgcctcaccccattgtctaatacttgatttctgccacctcctaagcactggccttttgggtttgggagacgagttcttggttatctcagaatgcaaacattctaccactgtgcaggttggggaagttgtgggaagcaagccaataagcaacactcctccatggcctctgcatcagctcctgcctccaggttcctgcttgagttcctatccttactcactttggtgatgaatagcaacgctgaagtgtaagccgaataaaccctttcctccccagtttgctttttggtcacgtttttggtcatggtggtttttgtcatggtggttttagtcatgttgcatcaatggaaattctaagacagcccctctctgaaacccctccttctagaagttgtcttggttcatggtgttttatcaaaaggacaaaaaggtgcttttcacactcaggcctggcaaccctgagttcaatctctaaaatccacttaaacttggaaggacagaaccaactctgtcctctgacctccacacatgtatcatggtacacatatcccccataagtaaatacaaaaacactaatgttctgagtctctccctaaaggataagtggttactgctcaaagtcgatgtggataagggcttgagtggctggatttaagaaaagatttcctccctttcagtcttagtttcttgaacagtaaaatagaacaactatattatttgccaggtccatgcataggcttgtaatatcagcatcttggcaggctgagacagagtgattgtacactgaaggcctgcctgggttagagagtgagttcaaggccatcctgggaagctttggaagctgctgtctcaaaagaaaaaggaaaagagaggaggtgactgagtggtaaagtggctgcagagtatgcatgaggccctggattctatcccccacactgccaacaagataaaaaagaatctattatctatgcttcctctatcttcctcattctctatcttagagcaaaggttcggggagaaagaggtggggagtgaccagcctgttgtcatcacagactggctcatacctgctgtgcacattcagggtcccatgaggaacacacccagtctgacacatctcagccctttaaagttgaggcctcaagccagttcagagtcctcagggcatggtaaatgcaagcccaaggcctagacacaaacacaagactggcctcttgacctccagtcctaatgcccataaaattaggcagatgctcatgcttggaaatgaggggggaagagttagattggattagatgggcagggaagctgtagtctcatgggtgtgaactcatatacactgtgtgtatttgtacacagatatcatgtacatacatggatatccataggaatggtactttggatgtaaaacatcagggcatattcctagcattatagtcactacttttttttttttgttttttttttttagagagaggttttataagtataggtgttttgtctgcatgtatgtctgtatatcacatgcatgcctggtgccacagtggtcacaaggggacatcatatatcctggatacagatgtttgtgaggcactgttttggtgctggtagtcgaacctgggtcctctggaaaagcaatagtgcttttaaccactgagccatctctccagctcctttttattttacattgtttattttggcagtaccgggtattgaagctagggcatcaagcatagggggcaactgctctagcactaaaccacggttccagcccccttttgatagttgccaggcccaggctagagtcccaagtagactggaatttggcctagcagtttgaacattgggtacagccaatatcgggaacagaatccaggtcaattagggtaccagagtatatgccaagagctgtattctctagacttggggaaccagaattttgtgctccttccaagatagagggtccacggggagactactatgccagacactgtctatgggcttcagcttacaactactaagcctttgattagaacctttatacatcagatctgacatatagcttgactgggaaaatatgtggacaagaccctttccttgggatgtcaaacattcacttgctaagatacatatacacaggcatcaatacttgcttgttattttttttaaatatatattttgggttttttttttgaggcagggtttctctgtggctttggaggctgtcctggaactagctcttgtagaccaggctggccgtgaactcagagatctgactgtctctgcctcccgagtgctgggattaaaggtgtgtgccaccactgcccagataatttttttataaatattttaagatttttatgtgtgtggatgttttacctacatgcatgactgtaccacatttacaatgccaagaaagctagaagagggtgtttcatcctctggagctgcagttaacagacgctagtgagctgccatgtaggttctggaaatcaaactcatgtcctctggaagagcatctagtgctctcaaccactgagttgtctctccagcccaacttgcttgtcatttaattaatagaaaactagagaaatggttcagtggtgaagagagtttgcagatcttttaaaagtattttaaatgaggtgtataaagtgttttttttaagttattttttattttgtgtgtatgggtgttttgcttgcatgcccagctgtataccacatgcatgcctggtgcccagggaggtcagaaaggtcatcagaccccctggaactggagttaagatagttgtgagctgccatgtgggttctggagtcaaatctgggtccccagtcagtgctttttaactgctgagccagatctccagccatattaaaaaaaaaaaaaaaaaaaaaaacttcctatttaatgtacatgggtgctttgtctgcatgcctgtctgcaaatcagaagagtgtgttaacccaattacagacagttgtgagccaatatgtgggtgttgggaattgaactcaggacccctggaagagcagccagtgctcttaatctctgagccatctctccagcccatccagccagatgtttttttatttttaattgggcttctctgagtatggtgacacatgtctttaattctaatacttgaggggcagaggcaggtggataggtggatatctgtgagaccaggccagactgatctacgtagccagttccaggccagccagagtctcaaaaaactgatacacacacagacacagacacagacacagacacagacacagacacagannnnnnnnnnnnnnnnnnnnnnnnnnnnnnnnnnnnnnnnnnnnnnnnnnnnnnnnnnagagagagagagagagagagagagagagagagagagagagagagaatgtgcacactgactcacactgttgcccaggctgttcctaggcactgagtaggtagaaccacaggtgcaagccacacactcagctacttactatttactgaacaaacaaatgagactgtccatcaaagtagtctcggacacggacacatgagtagggcaagagtggattcccctgagaagccatggaagaattttgaagacaggaagtaattttagaaaggcatgaaggaggcaatcaaggaagaggagagcatttaacatggaggcgatggagttttactagcacagggtacacagagaagaaggaagacggagctggagagaacctgggttatgaagagctatgaatgctgttggattgttgagctttgtgagaatatgaggttttagaacaaacaagtggtgtgacaggagggacatgttagggattagtttgtcagcaaggaggtcaacagagggtgtgggattagtgggaagtggctgtgctaggcagaggctcaggtttgcacaaatgagggcacgttggaaactctagtgtaaggaacacagtgcctattgcctcccctcaagcctctgggtattattttctggctctgtcctctgcctggcagtattcagtcctatcttagagctttttggcctggctgaggcagggttcttgaaatcaccagagcatggagctctgaactcgctcctgctggccaaatgggcaactctcagagcctcatctactagatctgttctacttagagattcagaagctctagcctggaaatccccaggaccggtgtttgcaatttctccccaagtgtctcacaggccattgcaagaactggggcctggagcatgaacatggtggaattttggggatgaagagtctggaaaactctcactctattggccctaaatttgaatatatatgtcagcaggaaagatcgactaaggcccagagtggtaaggacttacttggcaccacacagtcgggacacaggactggaagccagatctcactggagacacttcagaatcctggagttcagaccctctggtaaaggttaaatcctgtgatttagacttctgcttctgccattgactatagcttaattaccttggcgagttacttacattctcctggtatgtttcttcaactgtaagaagaggatactatttaccttttggggttattgtgaagattaaatagcagccgagtgctcggcatatggtaagtgttcaatgtcagctggcgatctggcagaagcagtagtaacccccctctcgcccccgtttcctctctctgagacttaggctgccttacctcttgaacctctcgtctacctaccaagtgctgggattacaagtgtgtgcctgtattctgtttttccatatgcaaatcagggccaacaatccctgtcttgtcactcctctgtcctgttccggtagcaacgtgtactaaataaggtgtgtaaacctcctagggctgagctgtttccaggtcaatgtttgttcagcttagagcaatttctttccaaggcctactctgaccaaatttcccgtcagccccaccaactcccccacactcgcaggtgctcctttgtaactgcagaaggggaaaggtccgctccagcccagggaaaaaaggagagctgggaaaatggaaaacgtgtagggaagagatgggacagaggaggaatagcaggtaagaagggcagtgaggaagagcggcgaaggataaggaggggggtgaaagggacttacagatggagtgtggtgggggtgagggggtcctcctgagctaagatgcaggctaagggatgtgcggagcactggggcaagtgaaagagcaaggttatgtgcaggaagagcagcgaggtcgaatccttgcggaagaacggggcggagggggggtcgccatcagtgcgaggtctgtggatgactgggggcagggaatttgggccgtcacctccactcggtcggaggttcggagcgcagatcccgggctgcagccacccgcaggcgaaccgcgnnnnnnnnnnnnnnnnnnnnnnnnnnnnnnnnnnnnnnnnnnnnnnnnnnnnnnnnnnnnnnnnnnnnnnnnnnnnnnnnnnnnnnnnnnnnnnnnnnnnnnnnnnnnnnnnnnnnnnnnnnnnnnnnnnnnnnnnnnnnnnnnnnnnnnnnnnnnnnnnnnnnnnnnnnnnnnnnnnnnnnnnnnnnnnnnnnnnnnnnnnnnnnnnnnnnnnnnnnnnnnnnnnnnnnnnnnnnnnnnnnnnnnnnnnnnnnnnnnnnnnnnnnnnnnnnnnnnnnnnncctttgtctgttctttgtctgtctccgccggcggccgctggagctgcgttctcggctctctattggttgccccaagccggtaggccatgacgtcgcttatttgcatatgacattgagacgtcaccaaggccagccccgccttccaggcttgcttgggtgcttgtcctctggtgacccggtgggcgctgtgtcgagcccggcccagggttgagagacattgaaaggcaagcaatacccgaggggactcggcggtttcccgggctcatctagagactggggtcgggcctctcatctgctttttccttgcaacctgaggaagggtcagaaggcacagctcaatctaagttgagagggaggtcggtggatcaaagagacttcagagtccgggtccacgagacagcaccagatggcagctgatgccctgtcttcaggctccgccccccccaacataataacatcgtgctaatccctgacatgtgtgcaaagccttggttgatgtcattttcagcctacagatattgagggtcttaaaccccatttcatggaagggaaaactgagacccagagagacatagcttactggagaactcagccaattagagtcacactctatgagtgacaggttccttagctgggggcaaatgcttagtacaagctcagttcaattaaccagctatatatccatctactggggaccctatcttgggctcagcaccaagccaatttgatagaatgtttcagtctccccgattctggacatttttccaggaggtccgtaaagattgagtcggtttcaaggcgaccttctctgccttctctctatcttagaacccaataaattgctgtctcccagctgttttgaccacagaacggtgagtcactagttgcctgcctccggtgtctcccgggcagatgttgttgagaatgagttgggagttccctttattggcctctcatcaccttgtcagatcccaagctgtcagctaggaggaaccagaccttccctagcactagtgctgtctggagagtcttcttccagaggatcagaatgttcctttctttccaagtgagtagatatggaggctggatctggatcctcttcccaggctggggtttgttcaggaatggcctgggctaggggtggcttagggctcaagtgctattctgggcacagctgctgtagtattaagggaaggttcttcctggagtggagccaggaaactgagaaccaggaagccagcaggctagggaagaaaacccaggaggctctccttgtggtcaaagggaggagtgggcagtcatagctggctggttgttgtcatctctcctggctgtcactgactcctgcatgatctccaccaggtaccttctctgctgagcctcttacctcactcaacatgtcatcagttgaggttccttgcagggtctgatacagcaggaactctgggaaatacatgttagaacttggtgatggctggatcaaggcactagtccaatctccctgtcttcggtgcacttttactttcttgaatattatctttgaggcttttctgattatatatgctctgcatttccccaccactactaagctgtagcttttttgatagattaacgttatcactttgaggtctccatcctagaacagggggcttcttttttgtcttggtccagggaaggactgtctgaaggcttgggtcttggtccaacccttgtgtttatccttaagggatgcttagatctgactgcttccttcttccatcatctgtcactgacatgttgttttactagggtaaggcaacacaatattctttgtcttggccagagatgctgtccttgaacaagagtctgggggaaggggttagagtaaggaggacctgtgagcataggatcttacacctcatctggaatacacatctgagggtcgtccaatcccatggtgagattgtagcaagaaccatgcggtttctattagcacttttcaagccacacaacgtcctatgagtattattgatctctggggtcaaagattgctgctcagaaaaccttgctgaaatccaagatcttttttttttttaacccctagaaaaacacacctagacacagccctagttacaaagctaaaaatgtctagtctagacagataacccagaaaagacaggagtggactatagtgattatggagccactggttatctggattcaaatgctacctgtgtcttactagctgtgagactttgggctagttgctttacctctctgagccttgttttatttctctctttaccagaaaaaaaagtagatgttctctctccctttctcttccttttgacaggatctcatacagccacggactgttatttttttaggtagggtcccatgtagctcagactggctttaaacacactatgtagctaaagcaggacttgaactcctgatcctcttgcctccaccttactaggatgatagatgtggcttctcatgtctgactttaaactttttgatcctcttgtctctgtctcccaagtactaagattacaggcttgtaccttcataccttgctctgattctgtgttattgtgaggactacataggtaaaacagatggagttgcttaggatggtacctgacacatgaatattaattttatgatgatgatgatagtaagagcagtttcttccctcaatggaaatttcctatttacttttcaaagctgtttcattctccagagacaaagcctagtcatatatatcacttcttccgtatccccaaagcaacctgtagtaacagcaaatatattagcttattggacacttactgtgtgctcaggcactgttctaaacacattataagtgtttagctcatttaattctgattaggatattgtttgacaaataagaatacaaagaccaacagtttcctgaattcacacaggaaagcctgctgactgcagaaaagcacacacaagagcctgcccatgctcagggtcctggagccctctgtcccccagccaccaccattaggtagactttagccttaatgtctttctctgcttcctaggttttcgcactgccatagggcgcccccttgaggttgcttcacccgctgaccatgttccagcgctttaccagccttttcttcagcactccttcgcctcctgaagactccaactgtcctggggccttcgtctcagaggaggatgaagtggatggctggctcatcattggcctgcagggtgaggcctgagtcagggggccagcactaggaaggcaccataaggacagggaggccttatgcaatatggaaggggaatgtggctatttgggaattggagtccccataggcctcctgggcaaaatgaagttgaggcagtgcgcctagaggtgaggtaacacagacccttctcccgaaagccctgtctgtctcctgatttgttgggggcatacacctggggccccctagggcagcagggtaaggaccctggctctcaggtgctctctgggcacgatggacaggggctgtaggtctgactaacgatgccctttctctccccatcccctgtttccggtatgtgtgtgtgtgtcccacccctatcccctgctgctccttctcttacgcatggctccccactcccacaccctatagacagctacacagctcccccaaaccctggggcttctcctgctccggcaggccgccctccacccgcgccctccttgatggacgagagctggtttgttacccctcccgcctgttttactgcagaggggcccggtcttgggcccgcacgcctccagagcaaccccctggaggacctcctcattgaacatcccagcatgtccgtttatgtcaccggcagcaccatagtgctggagtctgggccgccctcccctcaccctgatgctgtcttgcctgaggaggatctcagtgatgggtgagtgggcacgctcgggcctaggagcctagcaggggagtgtccttgagacaaagggcgggccaggtgggtagttacagggataactgatcgtcttatggctaagatggggcttgggagagtcttggctcagacgactgggatcatcttggactgctaagccagagcgcagagtggggcttgtattgtttggggggtggagccctctccctctcctgtctagtttagctgcctcagggtagactctaagaaatatctctaattgggattgagggaagagttggtacccctcagggcatcatgtgttctgccccaagagacagggtgggagactcaagccccctgtccccctctgacatttgtactctgtccctgcagagagttggcgcctgcccgccgggagcccagggctctgcaccatgcagcagctgctgctttgcctgcgcgagcggcgctgctggagaaggctggccaggtgcggaggctgcagagggcccggcagcgggcagagcgccacgccttgagtgctaaagtgctgcaacggcagaatcgcgcccgggaaagtcgttcacggaagcccaagcaccagggcagcttcatttaccagccgtgccagcgccagttcaactactgagcgcccctgctgcacctcgagtcccgtgcagtctcctggtcccgtctacctcctctgcagcagccagtgtgttgctcgaggagtgtccagggtccgcctgcctccatctgggtaccacaacttccctccttcctaagtgtctgaggtgggatgatggccctctactcccccgatttctcagtgtctgaacttctaattcacccgctaacttctttcatccagggtcacccttcccatctccgtttctaattcttcaccatcacactccccactcctattttcccaagctcccttttcagaccccgattcttgtcatctggcttcttcactttgccctcctaacccagcgatttctaagaccctctcccaccaagacctggcacactctccaactttcagctcctactttccaagacttactcttttccatgcggcattgctcctgctcctgttcccctttttcattcctggcaattccctcccagtcctgaccaggtacagccggccacgcttgggccattgttcttaccctgtagtcaggtgtcaggctcagggttttgattttagttttccccctttctctgccctgggggctgagctccttggagctgcttaggcctggaaagtttaagtatgtggaggacagtgagttgtaagttagatgaggagaggggaacggagggaaagcgggcagcctattgggaaatgcagacagggacaggtgggttgagacacagtagggagcagggtattgtgagagctggcactgtgcttggtcagaggagctaagccctggtcttaggcttgagcctggagtctgcccccatttccttttcctgtaatcctgccttccagggtttcctgaaatctgtccctgttccccagcatctctccccccccccccccccccccccccagcctgcagccccccgcnnnnnnnnnnnnnnnnnnnnnnnnnnnnnnnnnnnnnnnnnnnnnnnnnnnnnnnnnnnnnnnnnnnnnnnnnnnnnnnnnnnnnnnnnnnnnnnnnnnnnnnnnnnnnnnnnnnnnnnnnntaccttgtcaccttcccttgacatgccaccccaggagtagaagctgggtaaggccccgacatctggccatctttgttcatatgcccaaggtgctagaattagcttaggagacatgcaggccagagggcttctaggcagggaaaagggtacacaccccaaggcaggaatgcagaggaatgatgctaaggaggatatctttgggggtaaagccgtccccagactgacagctctgccttcgtcttgcctctggccttatatttcatacttcactcaatatggctggttaataaacactcctgggtaggaggccaggagtctgttccagttcccaaatttttcttataaaagttcagggccttcaaggggctttaatgctctcccgcagggctcttcctgagttccctgtgggctttcctccctttctagtcaaatagctggagtaaggaattcttgggtagagcacagggatggggtagccagcttctcccttcttgtggtggggctcagacaccagcaacagcctcttgggatgccccgagttgtttcatattctttctagctgtccttttttaagtgtgtgctctccttcctcaaaacttttagatttcctgttacatattaacacaggtcttccctttcacttcaactccaggtttccaggcctcagagccaagccagggttggagaaaactgcattcctctgagggtaaaagtagccaccctctccgatcctttctcaccaggcttcctgtggggatgggagagggtgtccccaggatggggacagaggaagccctgctagggtcacctagcccaaggaaaagccaaatgcaaactatacgcagatcaaaaccttacaccagcttattagggccctcgtagttgataaccttgttcctgtcctaagttcttcggtgacaacctagtatacttactcttcctgctatctatcctaaggtcacttccaaagcaagcttaggatcttcagcacttccatgagctgaaactccctccagcccttcttgtctattcctcactgccagatggggcctaggctcagtcctgggcaagtgcccatgatcctgctgctgtgggaagtttgatagggcatatggctcaaatttcaaaaggcctcacccctgacttttatttctagaagctcctgtagttctagaaccctccaatctcttacctgactggttgcaaggcttatttttcttttgtactttcctatagattctgtagcatttgagtgtggcaatattttaattgtgtatagatttcttaagaaccaacactactcagtctcctgctagtctgcctcctgaagcatcagaccttgtcatactgtattgactgtgtatgtgcctttcaccttgagcatgcttcaggatttttttttcttaaaccacagaacttgaatacacaagggaaccagaattcacaaagtcctatgcaacctagacaggaggaggttagagagtctgtcttgattgatttcagagaccctagagaaatttgtaccagtttgtattaatgtcaatactaccagcactttgccaaaactaaggatgtcagagggacctgtttctagagtgagtcccaattacatcaaagggcaacttccagctttctccaataagtctgagtggttctcttgagctggtgtcactttctaacctttgccagtctagccccagcagggcactatgtgtgtgtgagtgctgtttggtgctgttttggagtatgcctgctccccagcctggaaccctctgatcaacttgctgtgacctataatgtcttaggtgcaacaaggaccctaccagagctcctgggtggctttcaagatccatgtagctttgtgtgaggggactgaatgcagacaaaccacagcctactctaaaaccttcttaccctaccacctagttccaaatggaaccaacaagttgagtgcagatctgttgggtgttttgtgttgagactggctgaaatgaaaaatctttgaccgatcatgttgtgatgtgtcgacagactcaaggacacaaccacctcgacctggtcatgtggcatgcctgtgtatgtgtgtaacaggattctgaatgttagattgtaatgctattcctgtatgggagaaaaaataatataaacaaataaaaatctatttaaagcacattatgctttctgcctgagttgagctaaagtctgagaaacactataatctcaagtagagtcaagacagagggtgttattattaggctggctttggctccagtttgtcatacaagagaggaagagggcaaataagttctctggaaagagacaatataggattcaactcataaaatattttttagaagatccttataagacacatatatgaagtaaaatacaggaatgaaaatagaggcacaacagagacactggccattcttttagtcccaagcactgggttataggacaaagagctgcccatttaactgcagaactgcaccgacaaccttgctggccagtctgagagcacctgaatggagcagcacaggaatgaggtggggaagtgccatctgtgttgctgacagtcccttgcctctaaaaatcctgggtgcctttgatatggagggttggttttactttctgagacaggtcttagcccaacctggtctcaaattctccatgtagctgaagttgaccttgaactcatgattctttttggtttttcaagacagagtttctctgtgtaacatcccaggctctcctggaacttgctttatagaccaggcttgcctcaaattcagatctgcctgcctccacctcctgagtgctgggattacaggcatgcactatactgcttggttaacctgtggttcttatgactttacttcccaagcactgtgattactagtgtgtgccactatacttgattatttgcaaacaaatgaaattacacacacacaacttgctagttctggtttgttcaaagccaaaaatgagcaaatagatacattttcttcatcttgctgggtgggcatttcaggtggcaagtgtctgagttacaaagaaggctgtgtctatgtatctatgatcacaaaaaaaaaaaaaaaagaggcttgcttacccctttccaataagatactttaaagttctatgacaaagacatttatttaacacgttcaatatttcacattgtacaaacccttagattctctttattcactggtccttttctacaacaaatacatccaaaaacactatataataaaattatttacaacatttccaaatgacaagattgctttttgccccactactgctattcacacacagtacttccacagcacaatacatcattagaagatctacaaatgctcaccctgtactttaggctgcttaagaaatgtgaaactaataacatttataatggtattagctcctttcaatacatggcaacattttagaagccttgaacttcattttgcaacaccaaaagggctgctcccctttacactttatgagacaacaggtttcagggactaggaaaaggattgagttattaaaatgactaactgtacagaaatagattaaaaagtcacagctgaaaattgctctttgtaaaattcacacacatttacaagtatcaagtcatcttccagcttgcttacttggattttcttcgcttggattgcactgcaccagttatatctgttggagaaaaggaaggatatgttcaacgcaggtagcagtgcactttaggttgtccacaatgtctagaattgacatagtggagccctattaggctccaaatcagtttatgggacacatgatttgaaaacagtcacaggctttacctgctgacttatgtggtaaaagaatggtcctgtatattaggaactgccaacttggggaaatgtgatgaagaccagggtgatggctcagtgagtaaaaaacttgacaccaaacccaaattcaatccctgggtcccacatggtggaaagagcactaattgcgtgtgatatcacacaatgtgataagggaagctgagatgtacctggccagaaaaattggcagtgttggggtagggaaaaccttatattctatcagtttgtgtgtatatgcctgggcatgtggaggtcaggggacaacttgggagtcagttctttgctcctgctggttcaagggttctgtggcaagcacccccacccctccatttctctgtgtagctttggagcctttcctggaactcgctccatagacatggctggcctcgaactcacagagccccacctgcctctgcctctgcctcccgagtgctgggattaaaggtgtgcaccaccatccagtgtggcaagcacttttaccagctttatctctaccccatccccaccaacatgatcccttacaagctgtacaatcagcaatctccctcacttattcccatcactcaattaagttacagtcacactaacagtgcttttggcgagacaccagtgagtaagtgaactgccccagaaactagcctttagctgtcttttgtagccaacccattattctgcagtaaggaacacttcttggtatgctacagttaaagtctctaaactttgtgacatggatcttcggtggcctacatataaggaggctttggagggctgggattacacaactctgcagagcacctgccaagcatgcatgaggccctgagcataatctcttgaaccaccccaccccaccccacagtgtacatatatttggaagcatttcagaacagggaacacaatcccagaacctgaaggctacataagtggcaactgagtgacttatacacagtaacagtgacataaaagggaaagactgctttgattcctttaacttcccttacacatatcattgtctcaagtcaagctactcttatctcagatttaaatgtttatttaaaacttctccagtcttctatggcagagtgcagtagtactctgaagctctacaaatgtaaatatttctttagaatctaactattgacttatttttcatacaaaatattttatcttggtactgtggcacgtaccttgtaattacacctgtcaatctcagcacttggaaggtacaggcaagggagtcatttttgatatatatagggtcttgaggatagccctggggctatatgacatgttacaaataacaaaagcaaactccaaattcaaacaatgttttaaatacctctcatcaaggtaaaacaattacttctcatatattcgttcaaaagataaatcagattcaactattttggatgggatgaattttctgatgctatattaccaggttcagtattataagcaaaaacggctttttaaaaatcataatattttggggctggagagatggctcagcggttaagagcactgcctgttcttccaaaggtcctgagttcaattcccagcaaccacatggtggctcgaaaccatctgaaataagatttggtgccctttactggcctgcaggcaacatgcaggctgaacactgtacacataataaaaataaatacatctttaaaaaaatcataatattttgaggaccccagcacccacataaaaagtcagggcagcagtgcatgcttgtaatcccagtgcttgggaagaaaaaaccaggcagctccctggagcttgctggccagctagcctggaacaattagcaaggtcagttggaggctctggagagatggctcagcagttaaaaacagctgctcttctagaggacccatgttcaattcccagcaccaacatggcagcttataactgtccgttactccagtttcaggggatccaataccttcatacagacatacatgcagacaaacaaaaatgtgcatgaaataatttttaaaaaaataaagtggagccaggcgttggtggcacacacctttaatcccagcacttgggaggcagaggcaggtggatctctgtgagttaaaggccagcctggtcttcagagcgagtgccaggacgggctccaaagctacacagagaaaccctgtctcgaaactccccccccaaaaaaaaataaggtgtagactaatactcaatatttatatctggcttccatgtgtatgcacatacatgtgtacaaacctggaagaatatatatacatatatgaaaatgaaaagattaaaaagaagctatgaataggtgaggtggtgcacacctttaatcccagcactgaagaggcaaaggcaggatttctctgagtttgaggactatatggtctgagtagcgaattccagaacagccaggactaccagaaagaccctgcctcaaaaataaaataaaataaaataaaaataaaaaaatcaaatggtgtatctgagacttggtcagatgtgactggaaatgaggtggggagagaaggacgagcaatgtcagattccacccccttttctttccaagtcaataaactggaatactgcctttgagtacaaatcaacatatgaggccctcagtaaaggtggtaatatatttttataaaatgtcttttagccccccccacaaagacagaactcttggcagaccttacagcaaaattaataataccccttgaagtcatttaagactatttacttttttgtttttggaaacagagtttctctgtgtaacagccctagctgacctgaaacaagctctgtagaccaggctggtctcaaactcacagagacccatctgtctcttttgagtgctaggattaaaggcccatgccatcacactcagccaagaccatttatttaacttgttatcttactgtgtactcagcgtgtttaacttggccttaagaaaacaatgcaattagccagtcagtggtggagcaagcctttaattcagcactcaagaggcagagactggtagatatcttagtttgaggccagctggtctacagagcaagttccaggacaggtagggctacacagagaaaacctgtcttggaaaaccaaaagcaacaaaaaccaaaaaacaacgcgcacacacacacacacccacacacacacgcacgcacgcaggcccacacacacaaaaaaccccccaaaaaacccaaacaaacaaacaaacaaaatgggaaaaaaaggagaagaaaacaatgtaaccaactttgctatgccttggatttcccatgaaattagcttttagaacctaaaataaatgcatagctttaatcataggttaggtactcttctgtgcccctggcccagaatgtgtgtgtgtttgtggcgtggtaatcatttgctgaaaacaaccttaaaacaaatacccaccataaacactgcaaatgtggctctaggttgataatgtctgcatgctgtgtggagagagctatgtagtcaggtgtgatcaggaagttatttcttccctggtgaaaccctgtgaaagatttctgtaaagaaccgttcattcctttcccatgccatgcttcctatactggtcaacaaatgcagagcaaagtcctttgttagaaacaagggcaactactggggcacagatgcagactcaaacaacagactgattacagacacacccgaggctacagccagacaaaagacacagggagagagagcggagaattcagaattgggttcactcttggtcaaactaatccaatgggcttcattttcactccttagttaagacactaagacactgagacaaagacaaagagtgttctttgagggtacctttgatgtgcaagtgacaagtggcttgggctgaaaactgaaggctggtagggatggtgaacagtgtctctacactaccatgagacataaaatgtttgtttttcgaaacaggttgacctggaatgttccctataatccagtcatgccttgaatgtatgaactttctacctcagcagcctaaatgttgggattaaaagcatgtaccaaaatgcctggctgaaatttttgcttcctggtattgtgacacatgcctgtaatcctagcacttgggaggcagaaggaggtgagtggatctctgtgactttgtctatcctggtctatatagcaagtttcaggccagccagagatacatagtgaggtctcaaacaacaaacaaaaaaacccaaatataaaataaaaattcctttttctttcatcagattttgaagtctctatcacttcccctggagggttggggaacaactactctggaccatagagaaaagtcattttccatttctgtaaatgtgtctggtcatttttatcttttgtgattcaatttgtatttgttacagagctgtcacgtggatgctgagaattgaacctaggtcctctagaagtcagtgattttttttttttttttttttttttttttttttttttttttttccttgtggctttggaggctgtcttggaactagctctggtagaccaggctggtcttgaactcacaaagatccgcctgcctctgcctcccgagtgctgggattaaaggcgtgcaccaccaatgccccggcgaagtcagtgatcttaactgctgaactgtttctccagctccccattcaaaacttctaagaagcattgactctgcagtaagatatctctgtgattcaggtaccaacattatatagcctccatggaaagtggtgttacttttagggcctctgtcttatctttaggtacctggcaggcccgtggcttacttcaaggggctctttgtgaggcaccctgacattccttaccagcaacaggtgagtactcatgtcagggtctgatgtcagtgtaccccctgccgttccactgggatggttttgtatgtttattgagaaagagagtcctgtagcccagtctggtctcaagcttgctatgtagctttattggtcatcttgtccctgcctcctaagagctgggattatagacatatgccattatacctaccattcaagactgaaatgcaaggcctgcatctatgaaaactaaggatttgccagagaggatgccgaaaatgacttaagagttctggatcacagaagtcaagaacaattaattaaaaaaaaaaaaaaaagaaagaaagaaaagaaaagaaagaaaaaccaaacagtagagttggggaatttcattcagttggtggagtacttgccttgatccattaggccatgggttcagtccccaacacaggggaagaaaaaagagaagaaagaaaaaaagaacagtagctaagacaggtggctcatgcccataatctcaggacttgggaggctaaggtaggattgccacaaattcatggacaacctaggctacagagtgagattctgtctcaaaacaatctccccttcccaaactaaagacagctttctttctttctttctttctttctttctttctttctttctttctttctttctttatttcatagaattatttgtttattatgtatagtgttctgcctgcatgtatgcctgcatatcagctgagggcatcagatctagttatagatggttatgagtcaccacctggttgctgggaattgaacccaggacctttgtaagagcagccagtgctcttaacttctgagccatgtctccagccctaaagacagttttcaacaaagaatactggtaatgtaaagctgaggtcataaaagaaattattagaggcacagatggaagcactaggctttgagttgaagaggggtcacactgtcatagcagcctacttagattaatatcttggtagtgtaaatggagagttctatttttttgtgaagatgtgagagcccccaccaagacagagcagagaatgtggggtagaggtttaaagagcatggagaggtcaagtgtaatagtgagtgcctctaacccagcactcagaaggctgaggcacaggcttgagagttgagggcaacaaagggggataaaggagtagacagtatgtagaaaaaggtacttgacttcagaaaagaagctgggccatattcaggatttaaatgaggtgagatcatgagctttctagtgtgtgggtgtatgtttttgacacaggacctcatgtaactacctcaaactccctatgtagctaaggatccttaaactcttacctcttaactcactagtgcatctcacattacagatgtgtgctgccacacttagtgccaagggtgaatttaaaatgagaccaacctaaattctttattcttccagcagtgtttattgctcttgtgcacacaaacagaaaacacatatgctaatgaactgacaatgaacaaagcacaaaaccaagagaagaaagcacactgacctaacagaagagaggatggaggtaaagtcctctgtggctgtgatgaggacacttttattccacccttcattccaccccaccccaccccacctccaaagcatccaaggcccactgctaacctttagtagagctggaggctgaagcaggccgagaggatcgttttcgatgtccattttccacgctctcagaagccacagttggctcctcagttcgagagtttcttcggcttggggttttggacttctcaactatctcttttggctcactgctgacagagggaagtaccaagtttccaagaaggttaaggacatcaagacaaacaaaaagggactctttaagtacagtttcatctctaaagtaaaagataattagcagctattcagggccaggaatacggctcagtctatttagcatgtacaaatcctaggtttaatccccagcactgaaaacaacaaaataaaacatatcagtcattatagacagaaatgggacaatgctgtcaagaacttaaaagtgagtctagtttgttacattagaaaaataaaataggctggatggtgaggcacatgcctttaatctcagcactcaggaggcagaggcaggagtatctttgtgaattcaaaggcagcctggtctacagagcaagttccagaacagctagggctgttacacagagaaaccctgtcttgaaaaacaaaacaaaacaaacaaacaaacgaaagcacaatgctggtgggattgtggaaaagcaggtgatagaaataaagaactgcaatagttcctctaaaaaccctcatttctttccctaaggcaatatatcccttcaaacattattttgtaaaatttcaggtataaaatgtatttaatagatgtttaaaagtttctactagtcccaaataatatctaaaatctaggtatggcagcacacacctttaattccaacatttgaggggtagaggcatgctgatctctgtgagtttgagcctaggctggcctacatagtgagttctggttcagccagagctacatagagagaccctgtctcaaaagaaattattatttgggggggttactaggaaaatatgagcatatagtggtattaggtaatggcatacatagtacattttctaagtaataggaatacattcatcatccactgcagatatgctgaatgtcccaactgcaaccctggctttttagcaggcaaatattaaaaattggtaatactgttattaaagacacaggggcaaaaacattttcatatatttcttatggagtataaattgtataattcaaagattctcaataaggagcaactgtgatcagttagatgcattcccagccttggacacatttttgattgttgcagtttgggaagtgtgccattggtgtctttgggtaaacactctatggtacaaagggagacccttacaaataattatctgatccagaggtcagtaatgttgaggtgggaaaacttggtgacatcctctacctcatttctagtaactcctctatttctaggtgcctaaagaaatcaatcttaaaacatgtgtgtgtgtagggggtgggggggcattggcaagctggactcatactgcagtttagacgggcctggaacttggaatatgtagccaagtctggctttaacacaaggcaattctctgcctttgtttcctgagtgctgtgattatagttatgaatttctacaactcagtgtaaagaaattcttttacatagctttgattataaccaacaatgtaataaattatctaagtagtgggattatattcacaatccactgcagatataatgaatgtctcaactccaaccctggagcttaagtaggaaaatatttaatattggtagtaaagacaatttaaagacacagggacaaaggggctggagagatggcttagtagttaagagcattgactattcttctagaggacttgagttcaattcccagcaccatatggtctgtaactccagttccaggggatctggcatccacatacaagcagacaaaacaccaatacacataaaataaaaataaagttaaaaaagacacagagacaagtttacagaagacataaaaacaataataataataattagttacttaattttggcacatctatatgaagtcttaaaaaatattttgtgaaaggttactcagacaaattattcatgctacatgagtgaatgggtttgacacacacacacacacacacacatctggaacagcacccctctgtatattctttaaagaagactacaagatgactgcaattttctaatgttttctttcttttctttcttaaacacaaggtctcatgtagtctagactatcttcaaacttactacatagctgaggacgaccttgaactcttgattctctggcctgcatctcccaagtgcaggtgctggatttaattctgctgaaatctgaaaatttctgtaaaaaactttttactatatccatggttcaaaaatgcttattaatatcactttaaaaatcttattaaatttcattgcaagaatagaactgaaatgattacagaactgaaatatattgcaacagaacaaaacaactacaagtctgcttcttctggaaagatctccatgtccctctctagctgtggacttagcctttccttctcttaggttcacagtgtatacagatgacctcctaaaccatcttctggggttctattatatggagttttaaagaatttgtttatttatttatttatttatttgcaggggtattttgcctgtatgtatgtctgtgcacatgtgtgtgcagtggttctggaggccaggacaggatgttacagacagttatgagtcaccatatggctgctggcaattgaacccaggtcctctgaaagggcagtcaatgcccttagctgctgagccatctctccagctctggatgatctattttaatgttttgtgccttccatgagactgtgagccccttacaggtacaaatcacagtgtgataatcaactatcactactccactgctcactcctgccagaggactctttgccagtaacactacagttgggaactgagccataactgttcactcattaccttagctttatataaaaaagttacccatatcatatcaaaaactaagcaaattcagagaggccacactggagctagggtggaattacaagtaaacaggtttgtatctccttctagaggtttgaaggatggttttctgtttgagcccagaaaacagtccaattttctgaggataatccctatgtggaacccctttctcttgtcaaaacaaaacaaaatagccaaagcaacactacccttgtgtttgtgtggccaatgtataggcagttctgcaaacagacacctatgaactatatatcaacttgatagaccctttttatggacaggtggcatgtatttgaaaaactcaaatgaattcaagtattagttcatctcaaataaaaacagatgggcagagtggtgaataggaaaatcaaccaatttggcatcagggaggaactgtgcatttatcagttacaatatttaatgccttatcctctagagtctagacttttatctacaaatctccaacttgtctattgtaatataggtcaaatgtaagggccctggagccagaagagatgggtttgtacatcatatcaccatttgctataactgtgaccttgggcagtttagttaatggtttctgacctttagacttctcacctatatgatataatttattatcaaaacagatattgtgaaaaattgagaggtaatacatataacatgcttgtagtccagagtatggcaaggaataatattcagataatgttagttgatatgaagagctgacatgaagattcaatgagaaaatggtattttacaagttaaatttctatacaaatgagacattttaaaaaacgttactgcgttccttcactaaaaaagggagtgattctttctagagctaatgaggttgggccacagatgcacttcatctgttctgatgggttatatagggtagcacagttagcagacaaaagcacaggtttggggttacactctacctccctggcatcctctttataacctctgagtatcaaacagccatgcttagaagataattcaaggaccaccagtaaagaagctagtgtatatatatagaacacgtatttcttcacttgtgtttagtgccgaatatgtaatcagttttgaaaacaatggtaagacagaaacttagtcatctagtttaattaagtgaactgtcaccctggaggagtgagggctcacagaaactctctcctttgagcagtagaaacaggctggtgctagagtacaggagaaagacaaggtgaggagacggttcaagacagaagaagctcatgccatggtcatgttaagtctgcagatatggtcatctttcttacctttgtccagagactatgactgcatttgcctcaagttctgtaaaaaataaaaaggagagaatgagacgtggaagcagttgtaatatgtccacagggagtttctagtagtctaccaaatgctgtatttagactaacaagtctctacgtcctacaggagtctcacccaccctatgtggtatgaagacaatgttggcactgatccaacttggtttgttgacaatgtaagatactacttggtctatttttatttctagttcatactgtgaaataatcctgttgggatcaacagaactaaattcacactgcctggttcatatttcatccagataaaactagtttagtaaaagaagtctcttcctttcatgttaaaatatcaccaccttcctgcattttctttccaaaggcaattatctttaaatataatagtgtcttttaaagattcatttttcccctgaacaacattctcactcaattttagaggggagagagctatgctttgagatactacccaaagactatattatatttgtttctgagacatttcacagacttcatcagctgccaagtgatgtcacagaaacagccctctgtctgtgagggctgcatctgtgggcattctttgggaataccagacacttcttttcagcaccagcaaaaaaccaaaacaaaacaaatctacttctattatgtgcctctaggtagctccatctcttacaaagacccttccctagtataccaaacagccatgtctcctgccactggccttcccctggctctgtgcctgttttcccatgtagagaagtcagtgcctcatgttcaatatctaagctgcctgggggatctctttgaaggcagagtacctagcttaaatttttatctcagctctttttctttcttccttctccccttctcactttgtagcccatgctgctctggaattttctatgcagcccaggctggcctaaaactcaaggcaatcctcctgccttagcctaagtgctgggattatagggaatgagctgccatacccgccatatgtcattttttattatccatgtgtttatgtgcaaattatttgccttctcaggactcaatgcctcatatggaaagcagagttgactacgttatctgctttaatgttaagattaaattgaaataaaacatatgaattttagtatagtacctgttacttagtagtgactcaatattaactattattatttggtcactttgtacttttcctgagaagaggcaggacttcactgtcttcaatgcaaaattttggcagagggaatccttgcttcccgtcttctgcttagctcccagaatctctcccataagattgaagtaatgcctcaagaaacatactaatattaactccttcttgggtctctatttccctgctgggtaagctggagtacacaaattcacctaatatatgttcaataataaaaatggttcaaacaaaaagatgtgctaaccttgaagagttgccacccccaacttgccccaggcatcctattctttagcacaagttgcttggagctccatatttagcccactttggactcatattcataatccttctgtcccagcttcctgagtgctgggattctctatatgtgctacatctggctagtctgctctttaagtcttagtttttaactaattaattctgtttgtttttttgtgacagtctctctatgtagccgtggctgttctggagcttactatttgaggctcatagagatctgcctgccttgtgccaggataaaggtgtgtgtgaccagcccagcttgtgtactcttctgaaagatgacaaagaagttgattttgagaacttttacactaatttatttaagtggaaggttctgagggtgttatatttttatgtttttgagatagagtcccatgaggcccaggtggcatcgatcttattttgtagctaaggataacatttgaattcctaatcctcctatctctgcctcttgagtgctaggattagaagtgtatgctaccatacttggcttaaagagatcaatatatattaaactttaaaaaggaacaaagtcccctagcccattattctgataaaaaagaaaaacagtaatagcccattttctggagtgaagagcctgggcagcatcaacattacagacatggattggggagggactcatgaggctccacctctatcagattatggctactggaagggtgtgagggtcagtttagttcaatggtgtagtcactggtaagctattcatgctccaataaatggccacacacccatgctcatagcaagcaactcaaattaaacctagtgggtcattaaaagaaaggcacatgagagtaggaagagggaagtgggaggagacaagggaaggcaatgggaggttgtatgatcaaaatatattacaaacatatatgaaactgttaaagaatacatttgaaaaacatttggatcaggaaatggaacacctctcccatttctagttggtctttttgttaggaaaaaaaaaaagagtattaatatagcaccccttttcttaacaatttctctgttcccaaatgtgcagtacaatgttagttatcatgtaggcagttagaagcaagaggaaaatgtgatggccgatgagtgttttgtacatccattctttccacagtatgtaggaaagtaataaaggatatagaatcctgaagcaagttttaaaatacaaattatatcttatttttattggcttacattcacacaatcattttttcttaaaaatttggtcatgtgtatttctctctctctctctggttttttgagacagggtttctctgtgtagctttggagcctattctgcactcgatctgtagcccagggtggcctcgaacttgttatcctcctgcctctgccttctttagcaaatcctaccggtgttagccaccacaaccagctgtatactttcaataaaaggatttacttttttttttttttttaatgtgtgctcgtgtgtgcatttgacacttgcaatgtgcatgagggtgtccagaaaggaggccaaaaagacccctgatcccttggagctggagttacaggcatttatgaaccaccagatgtggttctcggaactgaactctggtcttctgaaagagcattaagtgctcttacctactgagccattagcccaagttcacactgtcaatgatattctgatttcctttgggaaccagctcctttcttttttgtattcttcaacaaccttctgtgaaccaagaaccaagtaaaactaaacatgtccacgatactcacctgctctgggtctaattggcaaaggcagaagttgttcctactgccatcaaattactcgtgtgttcagagctgatccagcatctcacagcagctattagattacacttgacttctccttccagaaacaccacccctagttctaaatacgagggctatttacaatatcttggttacagggagcaccttaaaatcatccagagatgattgggatgattcattgtaagcagaggggctccaatacacctctacatctgccaagataatctaactatattttggtgcattcatgcttgctaccctagtaagcaaccatataacaattggctggctgccagccaagggtagcagggtcatggaacaggggaaacaactcaaggtaggatgacagacagacaatgagcaaagagatgcctttcttgagctttctggctaacacaacaaatgtgaaaatgaacaagccagttgggaaaagtactacgcaagttctcccacccaactcaaactggcttggaaacaaataggtaagacagtcccaggtacttactggcatgagaacatgtgacactgaggacacactgattcctacacatgtaacccatctcactcaaagaagatactctagatagtgccttacctggtctggcaacaggcccctgcagtgctgtggctggagtctcctttgggactaaagtctgtgaaggggctgaggcaagaaacaaacaaataagtcttttacttttttttctaactaaaccagaaagcattaaccaagttactaagtccctgcagccaccatgttcttaaaaggcagtaccgtaacaaagcaactgaactaacactcagcaacaaggattgccactccagggtttgttcctcctttgtgcagatataaagaaccaggaaggggatggaatggcaacaatagtaaccacaatttcaggtcaggaccccccccttttttttttgttttcagacagggtcttactgagtttcctcagtttggtcttaaacttaaaaactgttttagtaagcaacctagctatttttagaatgaatataccaatcacctcaacatttgaaaacttctgacttacccctctagagactacactctccttgattaataaaacacacaattctgtacttttctacagcatctagcaaaggtaatagacataaaacagacaataaatttatatctaatgaataaatcaatacagtattatttacttttctaaaaaatagtttaaaaaactttctaggggcaagacactgtgccaggcaccctcagagattccatctttttgcacaccagaaattcagcctagtattgaagttaagtacatgtagtacactgcactctttatgttatatggaaagagacacataaaagtataaagtgccatggggatccaaagcaaaagaatattctaggctgaaaatgtaaaagaatgttaaagatagaaattagtctttgaaagacaggtatttaagaactagaatacacaatacattctagaatagaaccttcctggatcactcagtaaggatttaaggctcaggtttgccagatctgtcaaaggtgtggcctctcatcttaacaattcagcctaataaaacttatgacaaactacaagaataagttacaccctttggtggaaactaaattttgtagatttctctctgtttagtagtcaaaatttattttgcatgcttctctgatgaggcttaaagctgtaccttaacatctatttagcttaagattggtttcgcacattttcaagacaaaagcacagaagtcccttggaaaggaatagaaccaactattataaacaaagtaggtggtcttaattaaaactgaaccctttctaattgctagttcatctccctaaaggttacatgtttattattatttgtgatccaaataaaaattattttctagttacttcatcgttattctcttagtatcagagggacaagttccctgaatggtaacagaaatggaaatatttagtagcagagaatacacttacaccacactaatttcttctggtttagacaaggtcttgcatagcttagtttggcctcaaactcagtatgtagctgaggatggccctgctcttgatagtcctacctcctccccccaagtgctgtgattatatacatgcaccaccatgcccagctttctttaaaattcttatcaacaaaattcaaactggaaacactgtccagcagagtccctttctcctataaggattctttgcaggccttcactcttccctgtatctatctctaacattgaggtaagcaggggaaagaagggaaggaaggctaccagagctgtcagagccagcatgctggcacttgatagtcaaattccacttgatagtcaagttcccactgaatcctacatatcctgggaggcagaattacaatttccactttacaggtgaagttcatggaactcactaggttgtaactggcaaccaatggtgttaaaatttgaactctgatcataacctctatttctgttcctcctcctaattggcaggcactcaaagtattttagctgcataaataaaagagatattattagctggcttagatatgacagaggcctcccagctatgggtaccattaagactgacctgtctttaagaatgtggaacttctgcatcatttgagcctcaaaggagaaagaagctgtaaggacacttgtgcttccagtattaactccctctgcagtacacaggaaataacctgaactagacgtccattaatggaatttacaaagagatcatgtccaaaggaaatgggaaataacatatgaactgtgttttaggtcctgtgctaagcacatcacatgcattacctcactgaaatcttgtaactattattgtctccacattacaaaggaggaaagtgaaacttgccccagtccattgagctagcaaatgctggtacagttaccaactcaagcctatctgactcttcacaacttagatcacgaaacctggttttctggtaagcttttttggagcagcccaaacagaaaggtccttgaattagtatgagaacaaggcaaagagaacaagtaagtcttcatgatgagaagtcgctgtgtacacccaagggaccatgccaggctggagacttacagtataggctcaataaatagtaaacatttctgagcttcaatctttttacccagaggaaggagtaagtttacatcacatgactggtataagatgatgtgagatagtgtgtatgaaaatgcttttacacacacacacacacacacacacacacacacacacacacacacacacacacacacacacgaaaatgaaacacgtcatcagttcagaagctaggaaggaaccatgttaatgaatataaactgaatatgggatttaaaagcatatttttcaatgtactttcagtaagtaaatctacaactatggccatttttcttcctctaagcagaaaagggctcatgctttctcttttgtgggacaggtcaacaaaaccctgacctgaggagctgatgccaagctcaagtacatacctatgctgggtagaagctctggatgaggtcccaccttctcttccactaggccacctgcaagtggctcagatgctacgccaccatgattgccttttgtggttggcgctgtggagatgagctcagagggtaccagtgtggttactattgagcgtacactggttgggagagcaccgccaggtaagatgggtcctgttgaggtggagcttgggcccatggggctagaggtcatttttagtagcgtgggtgctgagggtgttggggttttactgtccagctctgtggagcactgctctgttcccattagcccaggagttgtggtctctagccctgggccttcagtctctccatctgcaccatactgttcttcccctttttccagagagcctgtaactttcttacaagccttggtcagcaaaatctggccaattttgtccacttttcctttgcccttagtggatgagaccgggcttcgccgattggcagaggagcctggactattggtcaaaaggggagaaactactgtggtggactgtgaagagagcagagtgctctgatctgctgaggtgttcatctgaggactagcctcatctggatttaattcttttacttgctggatagaagaattaggagcgacgactggagaggatgtacaaggaggggaaggcagctgaacaggagtggcacgtgagctaaggaccaacggccggcctgtctgtatgtttggagcaggactgctggagggaacattaggtgctacaggagctgaagaaaattttatgttttgaggtatgtgtaaaggtccaacaactgcgacggagggaggcatcaggccactgttggttgtcaatggggttgcaggaattgtgcttggctgtgatcctttcataacctgaataattgaagatgaattgataaagacaggtgtaatgaactgaggccgggcattagattgagcagcggactgtccctcagaaaccataactttgttacccacgttgggcattgtgacaactgttgacatcaaggcagaatgcaagtttgttggcagggctgctgatgtgttagatgaagtggttatgggattggaagtaacaaatacagttatttggtttgggggcaaaggagtagaaatggaggaagagctgacaggccttgacattactggagggatgcttggtgcaacattagagctgacctcactcaattctggatgcgcaagggttgaacacggctcattactgtgaggtaagtttaaggaattagagggctctttagaaggcggatcctgcagtgtgggaatgacagatgcttttttgaggtcttcccctgaaactactggaggtgctacttccagatctgtaagcccagggggtttaatggtcacattaggagctccagagttgtcaagaagttggcttaatgatgttggtgcttctctcatggcaggagacatcaaatttttgttctcttcaacactggggagtttgttagcatccaaaggttgcccatcttttttggactgatcttcagggacaaccattttagcttcttggatagggactactttcagctcaacatttacctgctccttcctaccctgggaattctggcaatcattgtcctgaggaacgttcaaactctctttgttatcctcaagaacagcccccactgcaggcacaggcacaggcacgctgggattctgaggattaagcccactattgttaggaaagcttccagataaagtgggattagcaattggagtgggggagaccaatacatttctaggcagttccatgttctgcaacagggttgtgcttggttgagaagccagagtaagttttggggcttttgaattttgccttccaggacttggggtagttttcctactggaccctggactagacctgcgactgttacttggacttgcccgttttgttgttccaggattagactgttttccagaattcaccaccacagaatctaatttatgagcttgtggggcagcaaagttaggaggattatttatggtaagatttgaaggtgcttgcccgatggctttcagagttgttggatttaaaccctgttgatcaaagcccctatttaaatttggcctgggaggtaaaggaatattaatctgtggagggaagagtcctgctatggaggcattgagtctttctggtgacagacttatttctgaaggttctgtactgggagggcggttgttgggtgtctgaggataatagggtctggggctggctctgtttggagttttaggcctagatgtctgggttggtgcagcaacatttggaaagtggtggccatgggagctaggcaaagaatttacaggaggttgctggggagttgcaccttgagttgctgaaaggggagatggtccaggtttgggccctgtcatcattaactgattctgagaaactactaaatgtgacggcatgttatttgggcctcctgaaacagatggtacttcattgccactagcttcaggaagtgaggacaactctgctagtggagagctagaagaattctgtgggttctcctggtataccattttcctcgaattacttcccaatggagtattcacagacattgggattctttgtttatcaggtgatggtggcacagaggcaggtccttgcaagctaaccataacaggtacattgccactctgctgcacgggcattctctgggagtctgggttcagaggaccccgtggagggtggacattttgggagactggaagcctaatggatttagggtcttgctgcatcatgagcatcatcatcatttgttgctgctgctgctgatgttgctgagactgtggctgactaggtggtggtggtggctgttgctgctgctgctgaggcagttgtggttgtggctgctgctgtggtggctgtggtgggggtgccacatgctgcatgagttgaggaggcatctgttgcagtggcctctgttcaactggttgagtaggataacctaaaacaagccccccaaaatcagggaagttagatttttcagcaagaaaactttgctacctttagagtgtagctaagcagtactcataggtagcagactgcgcacaaacagctcaggcatgctgttcccattgtctgacacaagcaagggttcacactgcttaaggaggcaaaaagcaaagcattaagaacacgaagccccttggtgtttacgttgtgaatgaagcattactgcattaagactgtattatgcactataaatgagaaaaaccctatcaacagcaaagggctggttgcccagtatttaggtctcaggtagaaataatcagtaattcactgtgtgtatgaaataacatatttagaaatcgatttttctcgtagcagaggacttgtttttctcaaaatttggttttgatgaaaacagcctttttgttcctttaataaaagtaaaagatataattctagtattgagtccacgatctccatatactatgctgtatcctttgggctccatcctctgggggaaactgaatgtactgtattgcccccaggttgcaacagtttactaaagagagcagtaggtaggggctgattattatgttgaaataaaatgaagcactaaagtttttatgcatattcaactctatttactttcgtatataaaaatctttatttggaaaagtatttttcatgaatccacaattggagaataaataagtcagaagcatagacctcaggattaaaaaataatttggggacaagaactttgagaaacaatgccttctagatttgcagaagacaacatctatatgattcttttgtgatggtttacttgaaatttctgaatgaaaatcttatacaatcagtataaagagaaggaagattcaattaaaccaagaataaaggtggttcagtgtgggaacgtgggcacatgttggggatgtgattccataattatatttattccattgttgcatgaaaaataatttggaaggtttccagaaagtataagacatgaataactggctctggcagctggtagaaattctgggccaagattttctcagagctaccaaatgctttggtcagactctgatcaacagagtcactgtcttctagtcaaagatttccatggtaccaatgggcaggatccagttctgaagttgttttttattttatttatttttttgtcttgttttttggtgacagggtcccaagtatcccaggatgaccttaaactcattatgtagctgagtatgatcttgaactgctaaccctcctgcctccaccctgcagaatatagacaggcgtgtgccaccacacctggctcaattttgaagattttctttaaaactttttttttttttttttggttttgttatgttttaggcccgagtaacttcttgacatttataaatctggcattccaacagatcaaacacaatgggttcctatatagtctggggttcctacattaagaaaattgtaatttctgaagaagttcgtttgtgtcagggctataacacagatgcttctcatctttaaaatgagtttatcagacagcacagtaaataccaaagatagcaatagagatgacatggcagcctctcaaaagtcagagctaaaggcttaaagggcccaaaagctagaggaaatagccccagggagcttagtgatagtaaggcagattggggttgagagggaaagtcaggtacacacatgccccataacacaatcaataactatatttgttagtcaaggcatacaaagccttgatgcctttaggggccaggcggcagtaaagacgagaagttaggctgcataaaccagcagggtcctatggacactgcccaactgcagagcaatcgcctgtttctaacatcaaacgaaggttatttgtttagacaccaatagcaattcaaattcattaaaggccaaattcagcttgcaggtttccagtttgcagaaaggaggaaataaatgtctgaaggaattctggaatccacacaagagttcagatatgcctgatgggacgtacctttctgttcacaatgtcttctgaacatactcactaaggactagagactacctagcttcaacagtgctgctgtggctcactagtgacaactgtagtatgctaaacaatttgtaataagtaacatctagtcttgacatcatgatagatgtcctttgaaaaaatatgattaaacgtagattaaaggttagcctgaaaaatattatcacttttaatatgccaaaaaggaggtgaaattactcaggagaaagaaacaaagcattaactcttttcccccctttggttttatgagacaaggtttctctgtgtatccctggttgttctggaactctttttttgtagttcaggcctgccaaattaactctttacattcataggagagagcttgtgaaactttgttattctggaataaacttatgtcattgtttaggccaagaaaaaaacaagtatagagatattgtggtatctggttttggttccgtaatacctgggttgagaagaatgaattttaggttttcatcctttaacatttaaaagaaaacattctataatcaaagaagaggcttcaatactactggcactattcatttatgagctgctattaagctgacaatagtcacacgggcatgtattttgctatttttcatattctgcttatgttttaaagaatcacaataaaaattttattaaaaaagtcatcttgttttaaatcctggtaatagctctctgctttgagaaagtcaaaggaagtaagaattgcaggcaagcaggatatagtgaaaagttgtctatgttattatattttattctgatgccaactggaactacaatgctgatcaaaaaaaggcactttccattcagtttgatttgaggatttataatgaagccaattaagcaggtgtgcatttacatgtgaatttacatgtgtgcccacagaagttatactcgaattacttacttaaataccaatgcagagcttaaagttcagaagcagactagttagtaggcaaagcactgttgtttccttgatgagaaagaagccttgtaaaggtatatatgcaatgcaaagcatgtgattttagctaatattttattacctggtggccggtttgaaaattctggaagtttagggcctgtgttgtccaaattgattccttgttctccaggtaatgactgttgatcagcttcctctagaccagccggacgattatcttgggtgctaaaagtagcacaaatcaagtaagttgtataagtaatacatgaacctagctcaacctcttcctacctacaactacaatatgtttacatatcattcttatcataatctttctagtctggatactcaatattgacctaagagtaaactagccatttcattaacccttaaaatttacttactcttagcattgtacttaaacagtgtttccctctaattcctgacacaatgtttcatataatgacacacttttaggtgtttcaatgactgatgaggagtttgagctaccaatatcctgaagtgctattcctgcaaaacaagtattcagtgtggccattaacttaaaaccaggtgccaatgactcaacagctgtaaggtagaactggtaaaaacagtattcagaagaaaggtggagaataccacaacaaagttactaagctttgctatagaaggaagacttatcgacataaccactggaattagaattctttttgtaacttagaattttagctggaaaggaaaaaaatgaaaatgtttttcctgctaacatccactttattcatttatttatttatttatttatttatttatttatttatttatacagcgtttctctgtgtagccctggctgtcccggaacttcctctgtagaccagcaggctggtctcgaactcacagagatctatctacttctgccttccaagtgctgggattaaaggtgtgtgtcaccactgcctggcttaagatccatatagtgtttacattcttttttaaaaaatattttttaaaagaattatttatttattatgtatacagtgtggtttctgggaattgaactcaggacctctagaagaccagttaatgctcttaacctctgagccacttctccagcctgtgcttacattcttcatttggtttgtttcttattcccagttgtacctttctttccttccttagtttcctttgatctgattacagtcatccacttttagatagtattttgtcccattacactctatattgttttataaaccacacaatgcctttaacagcagcagcagcagcagcagcagcagcaacagggctggaaggatggctcagaggtcatgagcactggccgttcttccagaggatccaggttcaatttccagcacacccatagtgtaattacaccaccggtcactccagatccaggagaccagacatccttttctggcctctggtggcaccagacactcatgcattggtgcacagacatacacaaagccaaactacccatacatataaaaaaatagaagcagagggaaaagccccaaaactaacagcatgttagcaggtcctaagcacaaccaaatcgctgtgccactcggttcctatttcagagcacgaagaaggagtttgtggtattcttcacttaaaaaaagaaaaaactatatctaaaacaaagaaagaaacaaaatccacccaaattcagttatctgctccagtccccctcttgttatggataagaaaacaaaagccgtaagtgtataaaacaggtttcacagtaagctaacagcaggactggaggtaggttaccttcctattaatcctactgtctctctttcctaggaacccggatgctgtgcaaggtccttttaaaaggatgttgaataaacagttaagatctcttaggagaaagttgatgatgacagcaaatgaataaccgaaatttaactcccagcctattagagggaataaaatatctaccaccataaaaaaaaaagttaactggacaggttggtaacagcaggaatttaactgaggatcaggtataagaaaaatgaggtagagtatttaagtctaattcatgaaaatatatgttgttaacacaaaatgactggcttttaatatttaagactcaagaagcagcaagttactataacaggttaaaaccaaagaatgctataggcttggctaaaggagctggctttagtttgaacatttaagcttatttaaacaaagcacccttgtttgagttttctctctgtctgtctctggtctttacattcccagcctttcccccttctctgcaaggtctcactatgctagcttcctcggtgttgagagaacaagtgtgagttgccatacttggtgtagcaatttgtctaagactgtttcatgctcattagtcaccgggccctgttggtaatgtctctgaactccagttttatgactaaaggctgaaaatccacctcaaacaatattccttcaggaaacatttagtaaagtcagaaacataactgagtatgtagttttaggatatgcaatgtaattgtcaattagccttcctattgtgtcttatgaaagagctcctctgcggaacttgtactgaaaaggaaactgatttaacaggaccaatcatgggtttaagtttttagggacaatgagggacttttagagaaaaggcacagatgcaaatgaataaatatttttttttcatttgtaagatggcagggtgtctccatgaatacatattgtctcacaaattccccaagagccaagataacattgaagtctgagccctgtggaatgacagtgggtagccctggtcacttttcaggttgatagatacaattcccattgagactacagaattaaaaggcctatcagccaactgtaaggtactgattttgtctgaatccttaaacaaataaactaaaaagaaaaaagaaatagaaaaatgttaacactattcggaaactattaagtagcaatttttgggtggtggtggcgaacacctttagttacagcagttgggaggcacaggcagttgggctctgagtttgaggccagcctggtctacagatcgaattctgggatatccagggctacaacagagaaaccctgtctcaaacaaaaaatttttttctaggcatgttaatgttattttgtggttatataagagaactatctttatcattcagagtggcactgatatatttacaaagcaaatttaccttaaagtaaataaaaagatcatagaaaagagtacagatgaagataagataaactataagctgatagttgttagacaatctcactgtactatcctaaatttagagaaaggtttcatgtagtccaggttacaggagtctaccaccatggctggtttatgcccagattttgtgcatagtagacagacactctactgagccacattccccaactctaattttaaatatgtttaaaaatttctatcaacaaatgtctagacagaaataaatgagcaatattcaaggttaactgattataacctactttagatcttgctgacaatttttcttcttccgaggcggtttcttcttcttcggtttatttgcattcgtattattttgtttattgtttacaccaaaatggcctgcagaaatgtcactttgcagtaagttgaccaacaatggacttgttagtgttacatccttattgactgggaagcctggattttgaccacaagacatctgatttccattgggtgcaccactgaatggtgcattgaaagacatcccatggcctgagaagtggtttcccgaagcactgtttccctgcatgctctgcacatgtggggggaccatgttggtttgttgcatgctaacatcaggcaacatctgagacaagttgacatcattatttgctgtagtagcaggatcaccatgctgctgggccatgtgtgggctgggtcctgggggccgcagaacctgcccctgaatccccataacctgagatggactgctgtttacaggcccttgctgggatagcatctgtcctgacatctgtcctgtaaattgcaccatgtttccttgcatgttcggagttggtcccctcattatctgtgctggtcccggcatgacattggattggttctgagtgttaaattgctgcttattcccctgcatctgattggtcattatttgctctatcattgggttctgttggagcaaaacttgcccctgaggccccatcatctggttatgtggtgccatcatttgttggccctgctggggaagcatctgcttgggtggggtcatcctttggggtgaaggcccaagattttggttctgagggttcaccatcatctggccctgtggcataagctgggcccttgaaaggatcatagggttctgagggttcaaagttccttgttgctggaccatttggccctgagagggtacaatctgttggtgcatgcccatcagctgagatggtgggccctgttgaggctggccttgcatgttgcccagggtcacctgaggaaccccagagctaccagcctgctggttgtttatgttgccatgaattcccatgaggctggattgcatcatatttggtggcccgtgagacacctgcatctggttttgaggagggccagctccttgaccaccttaaacaaaaacaaagaatgaaacatcatcatcatattactaagatactcaaactaccttactcagaaagacatccatcatccatgtatctaataatcaacacaaatgtactgtttgacacattttctgtgtggtattttgactctggaagtgtgacataggatggaagtaactgcttatatatttcatgatcatacagcaggagaaatgtatctttacttttatatagtaacttaaagataacattagaaagtaagtttaggagctggagaaatggctcagaggataaaagcactcactgcctgctcttccagaggtcctgagctcaattcccagcaaccacatggtggctcacaaccatctgtaatgagatctggtgccctctctgatctgcaggtatacatgtagccagaacactgtatacataataaataaataaatctttaagaaaaaaaaaaggaaagtaaagtttacttttaaattaaatgaagcattaccactgttgtaactattttattcacaataatgtagttataagccttaacaaaaaccatcatgggctaaaaatgagctttattatgagtaagtgagagaaacaaagaatgtaccagtgtcttccagaaaaaaactcaggaatactgtaaagacatttaaaaaatgcttcttgggaaagtaattatgcttttcaaaaactatgtgtgtgaaatctagatgttgtactttaaagaagataatatacaatatttcctaacacgaggttttctgctgaaatgacaaacttctgatctggtagctgtggacaggagatgttaaaagtttagtgatcctactctgtggcagtcccttgtggaccacaggggacatgttctaagttctctttaaaataggtcttggcctattgcattgtttgtttgttggatccttgggattttcttatagctacctgctttatgcctacatctcactggtggtgatggagactgaacccagggcctccaatgtgttcaattagagctatacccccaatctaatctaccccacagttcacctgagtaaaccttcagagcactatatagcaggttgctctgaaacaatgtgatccaagctgcctttaactattacgtttggcttaaaattttttcagctgggcacagtggctccatgcttgtaatcctagcacctgagcggctgaggcaagagaactgtcataagttcaaggctagcctgggctacatagtaaaatcctttatcaaaacaccaaaaataaaaacaaaggccacttacatgctgggcaacaactctactattgagctatatatccactgaactcatgctcgtaaccactgaactatctctccagccccaagaattaggaactttatacatttttaaatctcctataacattaactcacataactcagaaatgcagttttacattggcagacaggaaaaatcaaatcatctgtcctactcttctctcatccttcaagagacagtatttactttttatttattaagtccaatttttttctcattctcttttcttttctgagacagggtctctccatgtagtcttggctgtcctggaactatgttggctaaggtggccttgaactccgagatcctcccacctttgcaccccacgtgctaagattaaaggcatgtgccactgtgcctagcctcattattttaaaaagaataaaaaaaaattaatgcatatgtatctgtgtgaatgcatgacacattcatgtccatggagccagaggagggtgtcagatttcccgaagccagaaatacaggaggttgtgagccactgacacggacaatgagaattaagagagtagaaagcctttttaaacactgagtcatctctctagtcccttgttctttatttcttagaaaattgaatttttatttatttattattattactgtatgtgatgtgtgtgtaggcatatatatgcccattggcaaggaaggccagaaagagaactttaacctgctgagacatctcgaaggctctataacttttctcattctttaagtaatttacaatgaaagttggaattcagaaaaatttaagctaatttagttcaaactacttcaatgagaaagggcaaaaaattacttagttcctaaacaaccagaagaacccagaaacatgaaatttgggcttacaaaactgcttcaaggagtacttgttagctaatccactgtatgttatttcctgtccaaactttcttatatatactatactattggtactgactgaattggaaaagtgccacattgcataccagaatttagatactcagcatgaatgaagctgatatgtactatccagagattttaaaagttgcagatgttcaaacatgccataaacccatataactgtgaatttatggcttcctttcccagaaatgcctttttcctgagcaagttctaatctaagggtcagcaaatcaggcctacgattggtttgaaaacaggcaaggatttggaacactgttgtcctcactaagtagagttgaataactgcaatacagactaaatgacctaagctatttactatttagccctttatagaaagaagaggaagtatgtgtgtgtgagcgcgtgttcatgcatgtgtatgactcctgctctaactgaagtttcattttttttctcctaaggtgtttcctggttcttgaaaaaaactaaacaaaacaaaacttattttctgttatttcccaaagattatctacgtgtgaggaaattaaaggatttgttcatctgtatacctctattgtctatcaaagtatttaccacataatcaatgctcaataaatgtggctaattaaatcaaaataaacaaacctccatgctggacattttgatttgcttgcagttgaagggctcctgaattcccaggggtggttgctgtggtggaaggcacctgaccttgcataaagttcggattggcctgtcctgctgagaagccaggtgggaggcgtttaggcattccttaatagaaaacaatgagtgaggcagttacctagcaaatttatactcctgctgagatggaatgaataaggaaggatgagctgcatgaagtttccactggcttagctctctctgtcacactggtaggatctttaataataaggttgggaaagatggttaaaaaaatcaatacaatcccttacatgagcattgtcaaaatgaaaaagaaatactaaaaaatttccactcagaacatgccaaggaaaagatggcaatttgctccctacatgtgatctgaggccataccatagtaaggtttgagggctcacttttctctgtaataacaatgactcccagtatttatatattgcaacacaggcaccaaaagattatgctaaattctctcatgttcaaacaaattggtatgaaatagtataaagaaagagttgggtcccaattaaggatagatgggtgatgtattttcccccctttgaggaaaatgaatgacaatcgttgcagaaaaatctccctcccccaccagcgttgtgcttatctctttggaagagacaagagttcacaggagcttcaaagtgaggctgcattaaacttatgcctttctcttgtaagatttgctgtgattctgatagctatggtaccaaaaatcatgctctaatgtaatcctactcaagtttacaaccttttggaaggcctaatttcagaaaacaagtttgcagtaaagagaatctcagatccactcatgtgcataccgcaggtcttgatgtggtgagaccacctaggctctataaaagcaacaatacctaaagctctctcaaatttgttcattagggccagattttcaataccctgaaaaactctttgtagacaaatatgcatttgtcctttcattacagcaacaagtccccatttatatgctttcgttgtaattaagtcagtaatcatatctgcagaagggactacccagattctactgatctagggctagatgcccggaatagtgaagtttggagcagaaacattcttacattttctaaaaatgtcttagaattgaaatattagagcctgtatttcaacaaaatcaattataagagagtgaaaggactgatgggcaacttaactttaccagaaaccatgggagcatgcctttgctatgttgcattgaagatgcaagggtttttttctgggtaggcaatgggtgtctttttggggggatagtcttatcaggtgagttttactgacactctctatgccttactgaaaagctccaagcacagtcatgtgcactaggtcaatgattaataagaataaataataaacatggagatggataagttttactgtaatcgttttacctctcacacattaagctccattgctttttcttcatacaagaggcaccttacaaaataaataaataaatctcctttaggtataactagtggaattccctctctaaggagcaggcattggcattataaaactataaaagtaatgatttttgaacttagtcccctttaatactttaatcaaacttaacaaataccatgcttagattttagtaactaggattatcaaaattggtaagtagaagggcattttccccataaaaccctgtacttatcttttcatttttgctcaactgtataaaaatcttaatccttcaacaaatgagaagtttaaattattaataaaatacatgttttggtctggacattttaatttactagtacatgattaagcaaaaatagtttgaaacaaaatgaacatctctattttgaattttacctgcatgtttatccagagagctagcttatatttaaccagtaagatgttacatagtaatctagataaaaatacattaagttaactaagttttatatcaagtgtcatcaccatattacaaaaccaaacgattacatccttatttcagtcccaccattaacactaaaacctgacattctattcaaatctagcttcactaaatttaccaacacaagtaacttcagtgttcctcacctcctaggcctgggtgtaaactctgtggcccctggtttggtggctgctgctgcatcaccatgaagttaggtggcacatttccctgttgaaccataggattccgacctggagagctgacaggctgctgaaatccctggggaattgggttattttgaggtggccttggtcccatctgctgttgagtttggttaaccgttggggaggatgcaggggatccctgctggaaggaggagggtgaggaggcaggagacttgttggtgaggtggggttgttgcaggggggttgggaccctggagggtcctccctgcaagctcttcatctgaggagctgtgaactggcctgggttgctcatttgaggaaagtttgtatgggcttgtgaggcttgctggctgccaaagggataaggagggggagggtgagaaggtgtctgtaccgtggctaaggaaggtcttgcctgaagttgttgttgcattgggctaggcaaaggagccttcttccacccttgatttgcagtcattgtgcccagagagccctgggctggtggaggctgtagggctccagaaggcagctggttccagcctggaggaacaggcacctgagttggagcagtaaactgtggacgaatcccctgtggctgttgctgctgatgttgctgtggaggtcttgtctgcaactgttgttgctgctgctgctgctgctgctgttgctgctgctgctgctgctgcagctggggaaaattagctgggttcatttgtctgttcccaggaacaggctgcattgggtgatgtgctggaggtaaggatcctgagggatgactctgttgttgaatatggagtccagagagaaggggatccattgcatctgtttaaagatagtcaacagcaattaacctttgcaactcacatcatagcacactggcttggatctgctggtagcactgatattaccatgtgcttgagtatcttctaagaacaaacagaataccaacagatataaagatggatcctgccttaaagacagcttatggttcattgggatggtgaggcacatcaaacataaaatgtagacaacattttcaaaattgtattctgggcaattactgttaaaggaaaacaaaataaaatagtcaactatatttgtgaaatgctagacctaatgatttcagacaagtttttctttccttccttccgttctttatgtatgtatacagtgttctgcctgcaagtaaacctacaggccagaagagggcacaagatctcataacggatggttgggagccaccatgtggttcctgggaatttaactcaggtcctctggaagagcagccactgctcttaaccgctgagcatctctccagtccctacaagtttcctttttactgtaggaagcttagtgcttccaacatgttaatttatgaaacatttaccaaattcatatggcttcaaagttctgttatgatgtatctcataaaactaagcatgccaaggatatgtggcagtctgaatgaatggcccccaaggctcaaacagaggggcacaattaggaggtgtggccttgttggaggaagggtgtcactaggggtgggctttgaggtttcaagtgctcaagccaggccctgtgtcactctctcttcctgctgcctgctgattcagatggagaactctcagctacttctctagcactatgtctacctgccatgatgataatggactaaacccctgaacctgtaagcaagccccaattaaatgtcttcctttataggagttgctgtggtcatggtgtctcttcagagcaacagaaaccctaaaacagcatacttcttgggaatattggggcatagctgataagaaagtaagaaattctgagaagaaatgttgacatttagctgtgaaaattcatagtagattttgtaaagaaggtaaaaaatagaactaagcaattagaaattcagcatcagtgattaaatcccaatgatatctgtaagaagctccagcctctctgactgcagtgtgactacctgagtgagaagcagggcgaggagtcctgggctgcagttctggactggggcctggggccatcatggaagatgacatgttcccaccctggggcatcataacagtggcagggctcgccatccttattagtcctagaagaaaaaaagtactagaataacatactgaagttggcacatttgtgtgtgtgtatgggtggtgcttgtttctgagatgagatcttaactctaatgaccagactggtcggcacctcatggtaattgcttctggaagggctgagattataggtgagtcaccacactcagcttacaatttttatttttaatgatatattttagaaattctaaaagatacaaaaatttcttttaataactttttagatttaaaaactttatgtctatgaatgttttgcctgcatatacatatgtgtgcactacacacaagcctgttgtttgtggagaccagaagaggagttggatctcctggaactagagttacagatggttgagatagggtctcattatatagccttggctggcccaactgctacatacaccaggttggcctcacactcatagagatccacctgcttgccttctgagtgccctttttctcaattcttaagtcaaattcttagctcattaattttgtattgatgttcaccactgatacccgagagctttccttccaacttctataatggacatatttctcaaaatttgattgatacataatatccttactctaaatttccaagcacttttcaatttccatctaattaccctttaaaatcataagccatttagaatgtatttctaaatttttaaagatatgggtgttttggttatgtgctatttattttgccaaccacttaagtacactatggctagatagggtactgttccatggtatttactaaaacttgcttttgaaaacatttataatcatctcatataaatccacttatgcttgaaaagattaaaaactctggaattaggtttacatattttctatacatattcattcatatgaagttttttttggagataatgttgccatgactgaatggccttgaattcacagagatccagctgcttcctaagcactgaaattaaaggtatatgccaccaggcctggttcattatataaaatttttcatcatgtcattcaagctttcttcatttttataagtttgattcatcaattactaacagatgttaaaatctccaagacttgacatttcagtattatttttatatattcagaggctaggttattaggtgtgtaaaaatttagctatttttgatgaatttttttctgttatatggtctttttcatttatgatttttatcttttattgttattatttgtggtattagggatagaaatgaagtctttgcatatgctagataagcacttgagcaccaagctacatgtgtgactttttacattctgggacagaatataaattactctaataggcctccaatctggaatgtagtctcctcaggccttgaacttaaagtcctcctaagtaggtagaattacaggcaagtactactatgccaagattatatcctttactttttgagacagggtctcactatccatcccttgctgtcctggaacttgctttatagaccaggctaacttcaaactcattgagactcattgcctgcctcagcctccccagtgctacgattaaaggtatgtaccccatgcacgtgtttatccttttcatcttagcatctgtcttgtctaattaaaaaaaatactttttcctgctaatatttacctggcttaatattatattgtattctcatattttatgcattctcatattttctacagttctccaaacagtacagagctaaatctgagactattattctaagtaatcacttccatattaatagtgttctcaatccatttacctttactgtcagttactggtatattctgatttatcattcattctatgacttctatttataatattttctccctatgctatactgttttattttccctacattttattggattttttcatcatacctttcctttttaccattctattacttgcttcaagttgtacattctattattttactactatctttaaagtattaatcagcaaacctgacctagaatgtaacaactatatgcttgtcattactaagtcggccttacgccggctctggtggcgcaggccggaaggatttgctgaaggagtcagaggccggtggatctggagttcgactaagttggtcttacaaccaactacctgtctttatcaaacatcagctcactattccttcttagacctcccttcttcctgaagttcatccttgagcaggtcaattagcaaagatgtgttaatggtaaatgttccttcccccccaccccaaagaataaactttatttggcttatgagccaaacaaactttctcctgcacagttttggttccatgcagccacccagtctagaaggcagcaataagatccactttgcacccagcaggggcacctcttcagatagtggagggtttgccaatgtgctggtagttacacccttcaaaggaatgctccaaaagactatggccatatcccatatacatgaccaccagttctttgccttttacttgtggtatgcacagtctgcctttaagataggtttgtaacttggccgggtggtggtggcacaggcctttagtcccagcacttgggaggcagaagcaggtggatctctgagtttgaggccagcctggtctacagagcaacagagaaaccctgtttcgagaagaaaagaaagaaagaagaaagaaagaaagaaagaaagaaagaaagaaagaaagaaagaaaggaaagaaggaagagaaaggaagaaagaaagaaagccatgccaacaacagctttgttggtctggaaaatgaccttcttggatcctgaaggcaaattcacatgggtcttggtaactgggttgtgggaaatgaatgttacatagttcccagaggccagcactagcttgtccttgtccccaggcttcttctccagaaaacatgtaatagtacccacaggcctggtgcccactggtaaaacattgccaatattgagctggaccttcttgtcacagtacacagatgtctggtgtggattacctctgcagcgaagcttcttaaatggataggaatcacaaaggacaaccttcacaagaggagtgccatggacaaggtcatcaatgacctttcagatgccctcaatatagccgtactgctcagcaaagttcacagtatgcaagtatgaggcacaaagtttcttctgccctctatcagcccatggcggcgggtctgctagaagcacagctggtaatgctcttaagtttctgaaaatttattttgttctacttctcttgatagtgcaactagatttagagttctaggttcccaatgatttccttagcatttggaaatactattctaagactctggctttcaatgttccagctgagaaatcagctgtgaatctgatagtctttcctttgtaagcaatggctcttctggggtgtgtatgaggtgcctttaacattctgttttccacgttctgtatgtttacagtacagtttagatgtacatttatctgtgatgctcggtatttctgatattctgatatggaagaattgtgtcattttgaaaactattctggaaaattttcaggtattctttaatgcttgttcctcagtttcttcatcttctggagctcttttaaaattttttcttgttttatccttcaagtctcgtgactactttcatatttccactatttctcttttctgtattctgggtgatttcttcaaattctccttcaagtacaactatttcttaattttctgactaaatcattcatttgttgccattaaattttttacaagttctgttcccccttcaaacatatttgagacagggtctctctgtgtaacagtcctggctgtcctgaaacttgctttgtagaccaggctggccttgaactcacagagatctgcctgcctctgcctaccaagagctgagattaaaggtgtgtgccatcaccacctggcctgttaatatatttttcttatggttttcataattttaaacatgctgtcactattacctaaaattccaaaaactggaagtttaaccctaaaattcattaacttaccccaaacttgtttgttacagtgagttttaactgaagtccataatggcccagtggagaatgtgttcctccagagcatcagtggcttcaccagtctagaaccacttaatgttaatgacaggttagctgttcaggtcattttattaacatatgtccaacaggcaaatggttaaagaagatattccctgaacaaccagcctccaagcagagccaatgtcaagaaaggcaaacacccaggtatctgactgtgtcaaaggtaactaacatttttagcctagaaaatctggcttcatgaaggattttgaattctaacttcattcttcatgtagccttcctgccacccaaatcacttggctcttcagattctccgtgattgtttttatgttttgccccttcctcctcccccacttcaaagacatggtcttaacatgaaggtcagactggtcttgacatggtcctgactgctgagatcacaaagtcttatgcttccacaccagctggtcatcactatttaaattttcatttttaacggattgttttctctgcaaagttcttttgcttgcttaaaatctcagctatgcattacatattatatcttatgtagaacttttaggaattttctaattagagaacacaaccagaaaaagagttacctgttaaaattagatctacttctgtagaatcccaccccattttcaaagaggacaattaggaagaacactctcaggaaacaggtatggtgatacacacttgaaaccccaacaatcagaagacaaaggcagaaggatagctgcaagttcaaggctagcctgatctacatagtaagttccaggttagtgagggctatacagtgacaatctgactaaaaacaaaacaaacaacaacaaaacaagaacactcttgtgatatgaagaacaaatcttcttggcccacaatggggttcttatttctggaaattttccagtatacactgactatatgctcagcagtaacatgttgacatgcatttctggtactatgtgggaatttgaactagatctgtggtccttactgcaggtaatatccaggggattttgagttatccagagatatctttagttggcacaatagaaggagatgcacaagggtgctaatagcatctggtgggtaaaagcccaggatggtactaaatacactccaatgtccaagacagctattcacaacaaggaatcattcatcccaaataccaacaaccaaaaatgaaagttttgactaaatgattactacagtatactcaagaatcttgggattctctaagggcatgaaaaaaaaaagggctacaaatttatgtttagttgctttctattgtcaatgctaagagaagaaagtattaccaagataaattgataaattaagacattctagacacataattctaaagttacttaatattgtttcagagtaaaaaaaggaatcttttaattggtataaagaaatacctataggttaaaatgtcatggtgactacagatcatcactaattaattagtcctgtactttgtgttgtaaatgatcacaatcagtatcttccaatttaacctgatttcattagcttcaaggtcttctatgtggtaatgaacttacagcactgtaccactagccagatagatactagatgttggaatcattgtgctggcctcagcttaacaagtatcttgacaattcaagacttgatgggatctctaacattgtttccaggatataattaaagatgtttatggtcccctaagaccagaaaaaagtgcctgtggacaggagttgagatcagaactcagattccctgactttcttcgtgtcaggtccactcattgcctactctagtgacatacacagcgattgggctcttcccacccttcactcttcaggcagtggcaatcgtaccacctatgacttctttaaaaatttttttcaagccagggtttctctgtgtagttgtcctggaacttgctctgtagaccaggctgacttcaaactcagagttctgcctgcttctgcctcctgagtgctaggattaaaggtgtgtgccattggaggggaagctgtagccacgcctacttaggggctggccacagatgtgcctgaccatgcttgcgagggcatggccaggatgacgtacagcgagacttaaaggggactgtgtctctttcggtttctcttttgggcttgcgtacagactgctgccacgccagctggctaggacgctctataagtaaggcttttccctattaaatacccttatatttccacttggctccatattggtaatttcccactatatgccaccgccaccaccccaccacctatgacttaaaatcaagtcgctttaacacttgctcagagctgtacaggggaccaggtctatatataagtcaccaggttagacatttccattaattatatgacacttcacatcagtccaacagcacagattttgacagatgcacaaaacagcgagggctggtctacagagtgagttctaggactacagagagacctgtggccagagctacagagaaaccgtgtctcaagaaacaaaaaacagaaagagagaaaggaagggagggagggagggaggtcaagtccaaaactggtaaaatgtcacacacaagtgagtaggaagcctcacctggaccacttgccatgggaaatcctgcctccatcctaacagaatttccagatgccatgggtccattcattctcacatcttggcttcggttctggcccaaagccaggttgatagcaccttcccctgaaaattacagtagagttataaaatggaaataaaagtaaaatactgataataaccctaaccctaaccctaacccagcaccccagaggtgcagggaagatgggaagctcaaggctgtgctcctacatagcatgctggagcctatggctagacaagatcctacttaaaacaaaacaccaaacaacaaaatgatttgtggtagagaggtcatgtaatgacaaatagagaaatctcttctaactaacctttgtgacataaggtaagactagcatgtgaataggtttataatggacaatgctggggattgaatccagggccttctgcatggtaaccatgtgttgtatcaatcattaaatcttctgtagtatgtgtggtgtgtgtgtgtgtgtgtgtgtgtgttatgtgtgagtgaactgggcggtggtggtgtgcacctttaatcccagctcttgagagacaggggcaggcagatctctgagtttgaggtcaggctaatctacagagtgagttccaggatagctagggctacatagagaaaccctgtttcaaaaaacaaaaaaataaaaaataaaaatttgtgagtcttttgcctacatatatgtatgtgtatcacatttatacagtacccaaagaagtcaaaagagggtgttggatcccctggtactggagttatagatggttttgggccactatggttggctcacatggttgggtgctgggaactgaacctaggtcttctgcaagagcagcaagtgttcttaactgctgagtcagctcaatattctatctcatttgcatttcacctggtaggtaacatcactaggattgtttcaattaaacagactctaaggaaacttaaatcttaactaggcctaatgaagacagctgctgagacaactttcagagtgctccttgcacttaacccacagtgacacagccacctttgtggggtgaagatacagctagcttgtcactggggagttgaaagaccatatttcccgctcctttcatatcacagaatcttggtttccagtctgaagataaagcaggaagctaataaggagatactttcccctgtcctgtcactgagctttctgtgtagagtttaatcaggggactgactgcctggtcctagggaacaacatcctcccaataaaggaaccaccattagaggctatagcctataagaatcaagagtgaaaaaatatatatatggggttttggaagtctcaccaatggaaaggaactattaatatattaaacctattaagacattttaagtagaagcatttttttttctttttttgggttggaggggtttttatttatttaaagagaagatcttaccctgtagactcggctgtctttttttttttttttttccccgagacagggtttctctgtgtagctttggagtctatcctggctctggagaccaggctggccttgaactcacagagatccgcctgcctctgtctcccgagtgctgggattataggtgtaagctacttcactaagtaacctaagcagaagagttcttgaaatgacatcaagtaatatcactccttgttttttggcagttctccactgccagtagcttagttagtaaagtgattgctcaggacctgaattgagttcccagcacccattaaaaaaaaaataaataaataaaaaagagcctggacaacacttataatctcggcataggggaggcagagacaggagcatcactggggtttgatggccagttagcccagcctaattggtaagtctgagtgaaagtattaaaacacaaggtagggccaatgagatggctcaaagggtaaaggcatttgctttcaagcctgatgacttgaatttgattcccaggatccacatggtggagcaagataactggttcccatgggtcgtctacatgcacaaacacacacacacaaaatatataaaaattatttataaaaagaagaaactcttgcatacttgcccacagttgatgtttacatcaactacagatataattcacatcaatcatagagttgtccttcttaattaagatcatgggctcatttgagttcctaacaatagtataattatataccaggtgctaaaacaaagtaatgttattatatccttccttgctttcattcaacatgtttattaaagagactaatgtataccaggcaattcaaaaatacgacagtgaacaaaaccagacaagatccctttcctactagagtttaaagtacacagaggaataaacaataaccataaccaaattcctgtcctaaggaaagtgtgagataaatgatctgggagaaaggaacttttgttagagcatagtaactgactccaagtcagccagagacttaaggctgcaaaaactaacttgaagaacaggaatgagacagtactccatatacagaaggcaacagtgcaaaagaactgtgacagaagggagaactgtgtgttcaaaaaaccaaatgaaaactggagagacagtaaagcagagggcttctgggggtagagagtgtggaattaactagcataagtttatatgaggaagacagacattagaccatgcaagccttgaggccatggtagagattttggcctatattctatgaacagcagcaagcaacagaagggcaagctggatatcatgtatgtattaggttgagcatattttacattcaagagggtcactccagtgataacacttacaaaagaactgttcaggactccctaatctgccacataaacaaaggaaattgtaaagttattcagtaaagggtagcaattaaaattagatattcttcaaaagacaaatcagtttctttaagagtacaagtaaaaccaaagcctgagactgaaggcaaaagagccaacggaatgatgcttcaggctgcagcaatacctcaatgcttctttattctaagtgctgcaacttgaagcacagggtgcacagctgcttgagagtctcaaacataagagcagaggaatagacaaagcagcatcagaaactatgctggatatcactgttactgtattttggttcagaagggcacatgacaaagtaaaggaccttcaatctgaacggagagaatccccagatcccggagctgctggttgttgctctgagccaggatccgtaaccgctccgctgcttcccgggggatgttgaaagtgacgcgaacgctgttccagggctccactttctgtacctttagtttgctggattcttggtcatgaaggaaagagaataacattatcaattttgtaggaactagaggatgtgcaactaaaaagcaaaacaaaaactcctgctttaggtaaaagttgagatcccactgaagcacaagaaaccgagggaggaaaacatacattcaataggtaagcttcatggagaacagaaaaacatctggcattctgcaattctgaaaatgacacaaactttgggacatattcttaagaatacacaaaagctaatttctggaaaaagcatgtttacacatgctaagtaaagagtgaagttaacctaatatcatatacaaaaattaactgaaaatggaacaaacatttaaatatagacctaaaaaaaaatctttgaagaaaatatgtagcaaaccttcaccaccttcaatttggcagtgatttcttggatacagcagcaaagaggcaagcaacaaaagaaaaaaatagaaatgctggactttttttatatatcaaaaaccactacagagtggttagatatcatatcacataaggatggctattacaaaaataatatatagctctgggcagggggtgggtggcacatgcctttagtcccagcattcaggtgacccagcagaggcaggtggatctctgagttctaggccagcctggtctacagagagaactgcaggtcagccaggactacacagagaaaccctgttttggaaaaaaaaaaaaaaaaaaaaggatacagcaaatgttgacaatgatatgggaaacctggggacccctgttcactaatggtgggagtacacaaatggtacaatttgctaagagaactatatggtaagaagttttctaaaaaaaaaaattatatgatatagcacttttaattttaggtatgatatagcatttttaattctaggtatcagaatcgaaagcaggatatgcgagagtatatccatgtttatggcagcattattcacaacagctaaaccatagaagtaatccaagtgtccagcaacagataaacattagtaagcaaaatggggtacatccataaattctgtggaacattcagcctgaaatgggaagtaaatcccatcatgtgcacatagagaaacactgagaaaactatgttaaatgaaataaagcagctgtaaagagacaaggactacctgactctgattatatgacataggtaatagtcaaaatcatggaaagaagcctggagagatggctcagtggcttagagaactggatgctcttcagaggattgagattcaattcccagaacatacacagcaactcacaactagctatagctctagttccagcagatctgatgccctcttctggactttgtgggcactgcatgcgtgtggggcatttacatacaggcaaaatacccatgtgcataaataaataaatctaatttttaaaaattaaaaatatcatagaaagtagaatggcgcttattaaaggctagagtagagaaggaatggggagttatatgataggtatagatattaattttatgtgagttatagaaatggctgctaatgattgttataaaatattataattgtattttagtaccattgaaccatatataaaaacggttaagatagcaaattcttctatatgtattttaaaatcaaagattaaaattaactgaggcagtaattttgtttataattacattttgcaggcagggaagcaaataaaagctatccagcagctcaagactaaataattttccttttgttattaactcagatcaactaaatggtttatatgctttattcaattacatctttcagtattaataaaatggccatacaggaataggctttctcaaaatccagacacctatgaaaaagttttacatgtcacttaagcctcttccagctcttaaaccattaggtactaaatagtaacacagaattcatttgctctaatgtacaacaacaacacaacagatcaattgctaagggcaattagattaatatactcacaaaatttaaaaatggttagacaacatttagccaacggtctcttacaggtaagggactggggcccagagacaggctaagtgatccagaaagctgcagctacctaatgaacttacagaaagcattaaaacccagctctagggtttaaaactattgacgttctgctgaaaaactttggatcctggttccacaggagagagacacgaagtttctttccaatctgatgatcactggaaacttacccatgttctacatatacatcatatacaaagcaaataggtatgatgtaataaagactataatctcagccttcagcaataagatcttccttctttctaaaacacaaactaaaaaataaataaaaaatgatggtgaagagacatgccttccaatttactttgcgtaacagtaaccatgaaaggggaaacattcaaaaagagtaaccagaaggaaacaaaaattaaagcaattacccatgtgtaacaagttgggcacattctttaatattgcatccagtttccatttgaagtctttatcatctatatttcctttgaaggctacaaaaattgtggaatcctccaaaatactatcactttttgtgtcatcatcttctagtccagagtcaaaatccacctccgagtcttccattgttgatgaacacagggaagtatagatgtcttcgaagtttggaaggtcatccaaaaccatggtgctttattccagaagtatatgcaaagtgaacaataagaaaaccttaaaaaaagggggggtgcagagtattatatattcaacatattattatttaacatatcacccatacttatgtgaaaggtgtaatttattcactaagtaaaatttcctttcatagtactatatgctactttttttttttttttgcaagactaggatactgacaggaatatataaaggctacagggacataaaagaagaggactgtgacagtgtatacctgtattttcaggagagagatcacaagtttgagcccaccctaggctgcagagttaagatcttgtctcaaactaacacaacaacagtatccagaaaatcctttgtaaaacatctatatctactttccagctacatttcaaaaattctaatttaacacctgggcaatggaggtgcacatctttaattccagtactcaggaggcagagggagacagatttctgagtttgaggacagccttgtctacaaagctacttccaggacagccaggactacacagagatactctgtcttgaaaaccaaaatcaaaacaaaattctaataaactctgcaagtaaataaataaaactattaaagattttcagggcttaaaatcttttgcttaacttgagaaaagactgagtcttgaaactgctcaaaatctgtaactatttagcaggcttttcaagtaggaactgcaagaaaaataacctaatgatgtatgtcaaaggcttagtaaaacaagaacaagccaaaccaaaattagtagatggaaagcaataacacaggctagtgagaggcctaaacaaataaatactttgcttctaagccttggaacctcagactgtcaaaaaaaaaaaaaaaaaaaaaaaaaaaaaaaaaaaaaaaaaacaagaaaaaaacaaaaaaaaaaaggtggtgggctggtgagctgacttagcagatacctgtgactgctgccaagtctaatgctgagtttgatctctgggatccatgtggtagaagcaaagaatcaaactgcaagtgtcctctaacctaaacacacacagacacacacacacacacacagagacagagacacacacacacacagagacacatatgcgggcacacatacacagagacacacatacacacacagagagagagagagagagagagagagagagagagagacacacacacacacacacacacacacacacacagagacagagacacacacacacacagagacacatatgcgggcacacatacacagagacacacatacacacacagagagagagagagagagagagagagagagacacacacacacacacacacacacacacacacacacacacacacagacacatattcgggcacacatacacagacacacacacacacacacacacacacacacacacacagagagagagagagagagagagacagagacagagagagagagacagagacagagacacacacatacaacaaagccatcgacacaaacaaacagtaaataaagatgtttaaacatttttttcataaaataaaagacaaaatgaatgccaggacaggtgttaacataatggattaaaataaaatataagataaatgaaacaaagagttagttctttgataagataatcagactaaccaaaataagtagacatgaatgaagaaaattaagagtctggagatgtaggtcagttgacaagtgcttgcctaacatgcacaaagccctggatttggtccctagcatcatataaactgggtacagtgatacacctatcagtacacggaaggtggaaacagatctggccacacagggagttcaaggtcagcctgtggctcaaaaggcttcctttcaaaaaggataagtgtgtacacatgaattacccaaattgaaccgagaggatataaactaaaaagatggctaaaacacagttaggtctggtgagatggctcagtgtgtaaaagcacttgcagccaaacctaagcttaatgcccagaaactacatggaggaaggagagaacggcctcttcgtgttgtttgctgacttctacacctcctggtgacacacacacacacacacacacacacacacacacacacacacacacacacacacacacgcacagaagtgagatgtagagtctggagagacagctcagcatttaagaggacacactgctcttacagaggccttgatggatttcagcaaccatgtgggtgttgggagttgaatctgacttctctccaagaacagcaaatactcttaccccctaaactaactctccagccctactcaaccacccccactcttattgaatatagtgcttgaattctctattatgtgtttgcttttttttttttttttttttttttttgtttttttttttttttttttttttgaggcagggtctctctatgtagctctggctgtcctggaacttactatgtagatcaggaaagcctcaaaatataaaataaagtgtgtggtatcattcttagctagtggttgaattctttaccaggaggtaaataaaaagtatggaaataagaaaggtagaagtcaaattactcctgtttacagatatgattatatatttaaagaccctaaggacttcagcagaaagttcttagagctggtaaatactttcaacaagatagtagatacacaaaattaacatagaaaaatcagtagcagtactagtgagatggcccagcagttaagtgctcttgcagaggactggagcttggttcttatgtcaggtggttcacaaccttgcctataactccagttctagggactctgatgtcgtcttctgggtacccacaaacacacatgcaaataaaaataaatcagtaggttctctatatactgataataggttgttaaagaaatcaaagaggtggttcaacagttaagagcactggctcaaatccaggttcatctcctagaacctacatagaggctcaatatctgtaacttcagtttcagagtatctgtcttcttcaggcctccatgggaactgcatgaatgtgatacacagacatacaggaaagcaacacacaaacaatatatatatatgtatatatatgtatgtatatgtatgtatatgtatatatatgtatatattatatatataatgaaatttaaaataaaaccaaaaagatggactctaaaaaattctcttacataaagcttcacttaccaaaatgtcttaatttttatcacttttccaggtcatcatctaaatccaaacaaggtggcatctttggggcatgtatttcaaagtagcagccaaatcagaattctttagaaaggaaagagaagaaaaaaaagaggggggggcaagtaaaaccacagtattaaaaagaaattagggtaaaaatacaaacaagtaagttataaagtcaatatggaaactctagaaattagaattttcattagaaatcctaaaacagccgggcattggtagctcacgcctttaatcccagcactcaggaggcagaggcaggtggatctctgtgagtttgaggccagcctggtctccagagtgagtaccaggataggctccaaagctacacaagaaaccctgtctcaaaacaaaacaaaacaaaacaaaacaaaacaaaacacaacataacaaaccaaccaacctcaggaagggaacaggcccagctgctcaggctggtgatctcagcactagggaggggagggggcactcagcatgaggattaagagttcaaggcgagccttcagcaaagacagcatgaggcctgcatttcataagattctaactcaataaaacaaaaataaacaggtaaattaataatttttttcaaatgtgagtcaggtagttactctgtagccaactctgatattgaattcttggcaatcctctggtctcaccttgtgtgctgtgattacaggcaggggctatcatgcccagctcaaatatttttattttgggagaatattttttaaagtagttatataactagttaatttaagaaagtaaagaaagaaaacaataagctgggtggtggtggtggtgcaggaggatctctgtgagtttgagcccagtttggtctatagattgagttctaggacaaccaggactaccagagaaaccatgtcttgaaaaaccacagcaaaaatgaaagcaacaaagaaaatgaaaagcactgaagactattttggtcaagattttgctcatcataacatatttttttttgagacaggaaaaatgttatttcacacttgctgcattaagtgttatgtaacaaaatagcttccagaaacaatctaaactaagatattcctgttgggtcacagtgtcagtttctctgtgtagccctggctgtcccggaactcactgtgcagaccaggtagtcttgaactcaagagatccacccataaaggcatccatgagcagctacaaaatcaatactatactcctcccaagttgagagcgcagcatgaaggcccttgcacccaaagatctccagggaaaccacgaatattaagcacataggatgtctttccaataggaaaggtgtaaaacctatttttccacccagaaagctggtcactggaagtgcttagcagcctagggatctgtgtcctgtgttggaccaggtcatatcaagtcctacaaccaggactggagttggctaatattctaaatgaacttcacagccaggggctcctcaagttcccacaaccaggaccagagctatccagtagtctaaatgagccttatattatgtgtatggccaggggctcccccaagctcccacaaccaggaccaatgtgggctaatagcctaaaagacctccatgctatttgaatgacgaaaaccaggccagacctttaggtctttaagctagtatgggtaacctatttcttcaaagaaatgataaggctgagttgagtttcgatgtaattatgcttccttgtgccacggggattatattacacccggaaacctttccccaaattatactgtgtttaaatttgttggataaaccacctgacatcagactccccaaagtctgatccaggtgaagtcaatctgaactaatttttcattctcaccttttcacagttctttttccccaccatggccattcactcatacagcacatacaaacgtaatgaaaaactaaacaatcctttaaagagcacagaagtctaatggccctgaagttgtcccagagcacacagtatacaggaaaacctttcaagtctttttttaaaatttcttttgtacgtatgtgggcataccaatgccacagcactaacacggaggtcaagaggacagcttcagagagtcaattctctccttccacttctttgtaggttctagtgactggatgcatgcaggtaatcgggctttgtagcaaacacctttatggaataagtaatcttgcgagcccttcaattcactttatgaagtaaatataaatactcaatttgtaggcagaaagctacagatcaatctttcttacattgtttggtcttacaccaacgtttgagattctgagttaaattttaaatagactctggtagtactttaaaagaataataatgcatcatgaccaagtgaagtttgttgttggaattcaaagcaaacttggtatcaggatactgggggaaaatgttatgtggttctctccactgatgtaacttagccctgtctgccaaactgggtactgaatctaggcttttatatattcattttaactttgccacttagctatttccctagtgcccaccccctcttttttgagagaggtaccaactattagggtggcaatttacttaattagagacagggtgtgactatgtagccccggctgtcctggaactcattatgtacaccacagcctggtctcaaatgaatagatccacctacctctacctcctaaatgctgggattaaaggtgtgtgacaccatgccagcctgggctggactggcaatgtgtaactcaggctagccttaaattcttgatcctgttgcgttagcctccagtatatctggattagaagccaaatgacttaaccattcattcttgatgacaatttttctaaatttcaaaaaaaacatacaaatagccatgctttggtggcacacgcctttaatcccagcattagggaggcagaagcaggtggatctctgtgagcttaaagccagaatgttctacagatcaagttctagaagaatcagggctacacagagaaaccctgtctcaaaaaaaaaaaaaaaaaaaatacaaaagtacaaaaaaacccaaatgctttcttaacatgacaacattgatttcttcagcacaaaagtgaggactagtgtgtaactgggggaatggtggggggaggagtacttgcatatgtgaagcacgacacacggaaaacaacaagcacaagtcagcagcagcttcacagaggagggcagggtatatcaatgaagtcaggagcacagaagtataaaaatcagtaaaacgaaacaagaaacaaaggttaaaaaatatcacaagggctggagagatggctcagaggttaagagcactgactgctcttccagatgacctgagttcaattcccagcaaccacatggtggctcacaaccatctgtaatgagatctggtgccctcttctggtgtgcagatatacatcgaagcagaatattgtatacataataaataaataaaatcttttaaaaaatcagaaagaatgtaaaactaacaaaaacgacagacttgaaagtctgtattcttgaaagccaagcaaaggacagataaccaattaagcaaagcggcatggtacaaaatatacaggaaaaaaacccagcatttattacctatgaattcatcaacacatggggtaagatctcatttttaatagtgacaagaaagttagattctttaactaaagagaaaggtcaagatataaaaagaaaacctaaaaatacttatgaagggggttggagagagagctcattggtagagcacttgttgctcttgcagggggatttgggttcgattccaagcatgcacatggtggcttgcagccatccataactctagttccaggggatctgaagcctggatctttgggaaccaggtagatccatggtacacacccataccatacatacatgaagacaaaatgtatacatcaaaaaaattttaaatgcttatgaataacaaaattttaaagacatggataaagtaatactctcatgtgcaaagattcgcatgtgttagttttccctaatttataatttaactagacaacctgactctaaggtttgtaggaaaactctgaataatcagattagaaaatgtttaaaccgtatcagattaaaacttgttattaggggctggagaaatggttcagtgggtgacagtgggtgctgtgcaagcatgagaattagaacccaaatccctagcacccacataaaaagctgtgcatgggctggagagatgcctcagaggttaagagcacggactgctcttccaaaggtcctgagtttgattcccagcaaccacatggtggctcacaaccatccgttatgaggtctggtgccctcttctggcctgcaggcagaacactgtatacatgatagatagatagatagatagatagatagatagatagatagatagatagatagatagatagataaatcctttaaaaaaataaaaagctgggcatggcaagtgtgcacctgtaactctagcattgtggggtggatgcaagaggttcactggcttgctggctaccttatagctccaggttctgaaagaatttttctcaaaggaataaggtggagagtgacacatcaggacatccaaagtcctctgacttctaggcaagctggttctatgccccacctcccatatgcatttaccacacacatacacacacacacacactagcaagcattgatgcatacagtatattctcaatagttagacctactatggaaatttatagtgcatgggagattaactgaattttggaattttaatatctcataaaggtgaagaaaaaatgaattcttgtctttatataatggaacaaggtagtcatctagaagattaataaaattagatctatttctcctgctacacaataactccaaacagaccaaaaacttcaaatattacatcttagtattatagaaacacagaaccaacatttgtaatctttaagtggaaaggcttttctaatgactcaaaatctaaagccctgtaagactgatcaaacacaaacaaatagctggtcatcgtggcagacacctttaattccagcactcaggaggcaaaacaagtcaacctctgtgagttcaaggccagcctggtctacatagcacgttccaggccagccaagtctccattaataagatcctgtctcaaaaataaataaataaatagataaataaataaaacaaaaaagggggggcaccaacagaaaagcaaatctcagggctgagggaattttcttacttagttagcataagcaaggtcttgccttcaaaccccagcaccacaacaaaagaaaaagcaaatgacaggggtagggtaagttcaatcttcccaaaactcagatggtagaaggaaagtactacctttcctccagcctccgtatataacaccacggcactcacacatccacatacatacacatatcataaatgttcaaaatttttaagtaaagtttatggactcagggatagctcagagtcagatgttaggatagctcagtggtttagtgcttgcctaacacatatgagacactaggttcaattccagcactgcccaaaaaatttaaaagtatatttctaatttaatccttttagttgaaactaagtctttcaagatattcaactttcatttgtattccatagaattgacagacctgtttaagaactctctgaacactttcagagaaggtagtcaataggacccctctccattcctcccaggacctagacaaaaggggaaaagaacaaagaagaggagaaatatcagaaaagaccaaataaacccagtaaacagattctaagccaaattccacctattattatttctgttaatttattctaaagagttgtaaaagaaatgacatatagtctcttagcacagtggtttttagcaagtaaactattatcaccaagaatgctcaaggtattttcaaacagctgtataacagttacttacacatgtcaattcatttttaaaatcatgatgtttacagtttgtgctttgttttgttttttgagacaaggtttctctgtggagcctgtcctggaactagctctgcagaccaggctggctttgaactcacaaagatttgcctgcctctgcctctggagtgcttggattacaggcatgcaccaccactgcctggcacatttttcttaatgaatattatatttcaattgacatacttaaaatacagacacatagcccaggaggaaagcctgggctatgcaatgtattctaggctagcctgtgaaatgctttgagactgtctcaaaagaggaaaagaggaagagcataggagaagaggaagggggagaaagggaaaggagagagagagaaaggcaatatgtatttgcccaatgtagaaaccctaagagatttataatatgcattggagtctcacaggctagctcatttgtcccagcttgaccacacagtccatataggtgttcttctgttttaaactataagtatgttgataacatcatacattttaatttagcttttattttatattctgaaagaattactttataaatgacaactgtaaaaaacgaacaaagaaacaaataaataaaaacaaacaaataaaataacagatgtcactaacccacaattgtgccatagtacagttactataccatccattcatggaaatgaaataaagcctagaacccatacaaacatgtcctaacctactagtgttcatttttcaaatactaagatcagctggtatacatattcagaataatatagctttattcactatttatttatttagacagaactagctttgtagtccaggctaacctaaagctcctaatcttcccacctcagccttccaagtgctagggtcacaggtatgtgccaccatgtctgactctgatgagcaccaactacactaacacacaatgtgatatgggaagagagaggccgaccatactagggtggctttgccttgagttctccttgtggcagtcagtaaagttgtgaggcaatacacaatttttatgaatcaacagttctttaagttatataataagatgccagatcatgagctacagctaaatagattttcaggtttcttttaggttttaaaacattcaagaactataaacaaaacatttattcttctccagtgtaagtgggtagggaactatgataacctttgtcaaaaaactcatctcacagtttaaaataaaactgaaatttatcatttggggatttacagaacaaaaaaccctacatttaaaaatatacacaaataatatgtaagattgtttataatggaaagactcagaaatatccactgaagtacataatcaaaatatgcagttgataaaaattaattagatatcattttatgatttagaaagaaatgtatgatatactcaaaggcaaaaaaattaaaaaataaataaaaatagaagttgtaggccaggtggtggtgcacacctttagtcccagtactcaggatatagaggtgagaccagcctggtctacagagcaagttccaggacatccaaggctacagagagaaaccctgtgtcaaaaaaaaaaaaaaagaaaagaaaggtttttaactcaagagctttatgctttacagatttgtctgcttaaaaaattattttacttatttattagtttgtttttacagatacagagctggagaaatggctcagatgttaggtgcttgctatttttctagcaggctggagtccagatcccagcacccttatcaggcagctcataacctcctgtaaataactccagtttcaggtatccagtgtcctcttctggtatctgcagacaggcagacatacagaaacacacacacacacacacagaggggaaaaaaaaaagcaggcacaaaccatcacaaaatcctacaaaagaaatgcctccaattatattatcaggtgtttgtgtgtaacctcctcaccccagctctgctttcagttatctcctaacactgaagtttatctgtaataacagttgatcaatttgggttatactgaatacaattttatgtgcataatataaataaatatatatggaatgtatcaaatcatactgaacaaatggccaaatgagatgaaaagtgctaattaatacaatatattttctcagatacacatttctaagaaatcacaaagaaaaaaaaatgcaactttataatagagacctagcaattaccaccttagtcccctgatcactcacataatagcaatgtggcaaacaggaaggtacaggaaggtaccatggaagtcaagcattgcaggaccaagtattcaatagtgtaacatttttttaaagacatggatgacgggatagagagatgactcggcaattaagagcacttgctgctcttgcaagtattcaggttcagttcccagcacccatataatggctcagagaattccatcccctctttggcctccatgagtattaggcacacatgtgatacacatacacacatacatgtaggcaaacactgatacacacaaaaataaaaatgaatactttttaaaaaatatgaagaacctgaaagaagcaatgaaaagattatgaaagaacagggagaattctttttttccttcagatggggtctctatgtagccctgtatggcctggaactcaccatgtagatcaggctagttttgaactcacagatccagctgcctctgcctcccaaatgccaagattaaaagcatatcccactatgactggctgggaaattctgaaaaggtgaattaagctcacttaattttacaaaagaagatttctctttaaggcaaggagaaaacttagaatgatgtgtttcgaggaggaccctaagagagacatacatggtcccccagagaagaggaaagggacaagatctcctgagctaatggggaacatggggggaggggagagggagctagaagaaagagagggggaaaagaggaggggaagaggacaagagagaacaggaagattgaatcaggggaagaatagaggagagcaagaaaagagataccataatagagggagccattataggtttaaagagaaatctggcactagggaaatgtccagagatctatgagtttgaccccaactaacaatctaagcaatagtggagaagccaccttaaatgcccttctctgataatgagattgatgactaccttaatgccatccttgagccttcatccagtagctgatggaagcagaagcagacacccacagctaaacactgagctgaactctggaatccagttgcagagagggagaagtgatgagcaaaggggtcaagaccaggctggagaaacccacagaaacagctgacctgaacaaggggttgctcatggaccccagactgatagctgggaaaccagcataggactgatctagaccccctgaaggaggaagtcagtttggaggtctgggcaatctatggagcctctgatggtggatcggtatttatccctagtacacgaatggacttcgggagcccactccacatagaggaatactcactctctcagcctagacacatgggggagggtctaggccttgctccaaatgatatgacagactttgaagattcccccatggaaggcctcaccctccctggggagcagaaaggggttaggatgggggggaggggacaggggaggaagagaaggagagggaactgggattgacatgtaaaagaagcttgtttctaatttaaaattgttctaattacaattataaaaataataaaaaagaatgttgtgttgcttttttgttgtagtatatgaatctcaagatactgttcttgaacatagatgaaacccattaaaaacatgctaacacattatggttgtccttctccgtaaggtttaaatgttcaattattggtataagatttcctcagcatattgcttctttgtctgactaagttgcaaaatccctttttagcctggcacattagataacagtactgagtccaggctttgtttctccccacaaaattaagtactgtgagcttcctgttgaatataattctgtagctttactttgtgcttagacctcatttgctacacttgctgttatttattccctttggatgcttttcaagaaattcccctagctgaatataaaggataatgattttattatgattgttcaggaattgaaagatcagcaacatgtatgtccatgcttatataatctgccaaaatcttttctgtgtgaatgctcatgtttttgtccattactatttctagtgttaccctcactgtattagtaagatcccaagttatttaggcatttgactctagaatgtaatttacaacgtatgcattaaaaaagattcacagctgggcgttggtggcacacgcctttaatcccagcacttgggaggaagaggcaggcggatctcttctgagttcgaggccagcctggtctccagagtgagtgccaggataggctccaaagctacaaagagaaaccctgtctcgaaaaaaaaaaaaaaaaaaagattcacaaagcagatgtggtagtgtgcacctttaatttcagcacttgggaggcagagataggtggatcactgtgagctcaaggccagcctggtctacaaagtaagttccaggatacttacaactataaataatttttctttttcgagacaaggtttctctgtattgtttgagcctgtccaggcttgcctcgaactcacagagatccacctgcctctgcctcccaagtgctgggattaaaggcatgtgccaccaacgcctggcttgtaagtaattaaaaaatttttttgttacattagtgggcatacactcatgcacacaacgtacacatacagaggtcagaaaataactgttgggactaagctttctccttctatcatgtgggtcctggggttcaaactcaggtcacgtaaagatggaaaatacacagtctgaatcctgcatattattgtgctgtctttaaactttttgattgttgatgaaagagctgctaagagacattgtattatgaaagctgctagattaaatcaacctatttattctaaaaaatatcttgacttcaaaatggaagtcaaaaggtgtgttgctttgggtgataggtcatgcttttatttctacaagaaatgagaggtgggggctggagagatggctcagaggttaagaacactggctgctattccagaggtcctgagttcaattcccagcaaccacatggtggctcacaaccatctgttatgagatctggtgtcctctgctggtgtgcagatatacatggaagcagaatgttgtatacataataaataaataaaatccttaaaaaaatgacaataatgtcaaaaagttcacttaaaaaaaaaaaagaaatgagaggttgtggattcatgccaggttgatatggatcaggtttgatcagagaagacctcctaaaaatcctggctacagacacacaaaataatcctaggaaaaatacaaaacacattaacatgtattttactagaaaacattttaacataagataataataatacagtctatacttgtattaatgcagatatgtatattacctttagaagtttatgtattttcagagcaatggaaccagagcaaatggcccaggtaactcagcatctcagaacacttctgttacagtttcattagagttctatatccaaacaatttccgggatgctggctgagatggtccagcctcacagactactccagccaagacttaaccattatcctaaatttttcagggtctccctaaaatgccagtgttcccagatagtaggaagccatctatggaaagcaacatctacatccccaaaagatgaattatggatgtttgtctttgtttagggggtttggtcacaaattattattggtcatggtaaaaaaaaaaaaaaaagcaacaaccaaaaaactaaaaaacaaaacaaaacaaaaaggagttagattcaaagatctcttactgaaggaaaaaagggggatataatatagaaatgttgacatgaaatgatagattattgaatctactttaatcaacaaactattgatctcaaaatattttacattggcatggattttggttcattggtacaaatttacatttgttatactgtatattatgtttctactgttgtttagggtattgcatttatggagctcatttaaaaatgtaatgtataattaagaaatacagattgattgtagtcacccataataatcaagctttctataacaaacttataattctgttaggtatgttttcaaggtcatacacagatttatttagatagatggtcttcaaacacttcaaaaaccaatataatatggcatttaatatgtttaatacaccaaaggcttttcatgacagtgagacatgtctgctcttgacaatctacttcaaaaaaaaggatgatgggcatcaaagaacctccgtatggagttggctttctttatggcaaaagctagccatttgggcaaagaaattgctcttgcctcaattgctgacagtatactgtcctaactggaccagcagtatgcaaaaaagtgactgctaaactttgccaagacaaggtagatcagttcttcaaaattccctgcttcttataaatgtctgtcagatatacaaggcctgtaggccaaagatagatgtcacaaccttacagaagaactttgggtaactgtccaggcagccagatggccttgccattaggtaatattacaactttctaggatctttgacggagttaaaaactaaataattagacttaaagttttccttagttatgacaaaaaggtgaattaggtacaaaactctagactcacaaagataatattttaagattagcaaatctctaattttgctaaatataaatggattggatattataattcttacttgataactgtttttgttgtatataattgcattatgttaaaaccttccttttttatttagacaaaagggggaaatgaggaatatgtcgctgtggttgatttaataaagaagctaactggcctataggtaggcagaataaggttaggcgggagaaccagactaagaggatgctgggaagaaggaggagaagacttgggagtcttgagcagatgcagagagaagcaagatgaacatgccatgttgaaagaaggtactgccatgtagcagagggtagataaaaaatatgggtcaatttaaaatgtaagtgcaagctagtaacaagccaagcatttataattcatattctctgtgtggttatttgggaactggccggtgagacataaaagtctacctacagtaattatatctgtatttgtaagatatgcatgccacagtatggtatcaagatgcctttatttgtttttggttttcaaaatagggtttctctgtgtagctttggtagtcctagaactcactctgtataccaggctggcctcaaactcacagagatctgtttgcttctgctggaattaaagccttgagctaccaatgcccagcaagatgtctttattttatatggtttaacccattaagaatataacaacatgttaaacagagatgacaggcactatgacaggaggaagttagtgtgtatgaaaacttgtatgataaagtattttaagtatcacacagctcccaaataaactgtaatgtagcagggtgttggtggcacatacctttaatcccagcacttgggaggcagaggcaggtggatctctgtgagttcaaggccagcctggtctacaaagtgagggctaggataggctccaaagctatacagagaaactctgtctaggaaaacaaaaaccaacaaacaaacaaacaaacaaaaaatgtgatgtattgcaattgtgctacaagaaaataatatataaaatccagtttaactagtagctagtagcaacagaaactggtggtcattctaaagaatgatatgacaaagtagccaaaaataatatccttagtcctaattttaaatcactttagggaatatagtctaagagaaaaataggaaaggcttaaaaacagatgttacgggggctggagagatggctcagaggttaagagcactgactgctcttccagaggtcctgagttcaattcccagcaaccacatggtgactcacaaccatctataatgagatctggtgctctcttctggcctgcaggaatacatggaggcagaacataaataaaatctttctaatactttttatttgttttttgtttttcaagacagggtttctctgtgactttggaagcggtcctagaactagctcttatagaccaggctggtctcaaactcacagagatcgcctgcctctgctcccgagtggtaggattaaaggcatgcaccaccactgcctggcctaataaataaaatcttaaaaaacaaaacaaaacaaaacagatgttacaaaggtacaattgagaattgcaagacaaataaaaaaacaaattgaaaaatacttaaacaccaaataatcaagttttgttattttgtgtccactaaaaatggcagatacatagacatgactaaaagtgcatcaatactgttaccaaataataaaaatatatgtatggtacagaaggctgtgtaggtgataccttgtttatactctaataaataaagcttgcctgaggatcagagagcaaatcatagaggtatggaggtctgtacagacagacaggaaataagaatgttgggcagagaaatataaaacaggaggagacaggaacccagtctcttttcagtttgagtaattcataggggtaagagctctagaggctggctcctccacttctcagatctttcagctttcaccctcgcaccgccccatatctgactccaaactttcattattaagacctattagaattcatgttgcatattggcacccaacatggggcttgaaaccatgaccctgagattaagagtctaactttgaattttccaaatgctaatgagaaaggaatgacagctgtggagagacagaaaaactacagaattaaatcagcctgtgtacttttaaagatgtgctgacctcagaatggaaaccaggatgtgtgttatattggggaaggggttttgcttttgtttccacaggagaagaaaagctatggataccatcaaaattgataaagattagatttgaataggagacacctcttgattagaagaggtgataattaatcaaacaacatggctatccaatctaaactaactgtaaaacaaatgcttttcatttgattagatataacttgctataagggaacctccccaaaattagggtcggggaagtgctttgtttttgtcttttcaggagaatgatggcattcagctaaggaatctgaagaccactggacaaatgagacatatgaagaaaaaggacaaatcatccagaaaaaaatgttccaagaaaaagaataatttggcctattactttatcacatctccaacaagatacaatttcataaattttccaaaatgtttgtttctgcttttctctaaagacatacaatgcaaatggtctttttgtaatcctagttcaattaaataccaaagctggctttgcagttggaggatggctctctccttctctaaacccaagcatgcttattaaagcaaaatccaaaatctctgtcttatgtcagaagagccacctgatatagacagaagaaaaacaaaaattaaaggactattttattgccactaatctcataatactttggttctattttgagtctttgaagcttttcttgatataaatattatctaaaaatttataagattaatatatacatatttaaaggttttgtcaccgtatactgactaattctaggaaaaggcttcatctgggttcttgtacatgattctggatttgaatccctatcaaataactaggaattaagttttcgtactctggatgtacataacaaatattgatcccatatgctcttttgagatatgctgcatattacatttaacatgtttaagttttctgcagtgaaccatgaccacacctaacagcaacctttgaattatcaatgaaggatggagccccacaacaacaattccaccaggcctatggtagtaacaccactaagtccaaatgcaccatctacagatgagctctggactacaaactgttcaggacaatttcgaggtagctagctgagatgatgcagcctcacagactatgctagccaggacttgagacaagccctgcaatttcccattacacagagactggacaacaaatgataccactacctctcccaggacctgacaattaacccaaatttttcttttcagaattccctgaagatgtcattgcccccagacagcaggagtaaatttaagaatatgatgcccacattcccaagaggtggggtgtttgttttggttattcaatgggttatggatgtttgccattgcttggttagaagttattactggtaatagtcagaaaaaaagttgaacaaagaagattagattcagagttcttgttttgaacggaaaaaggggggatatacatatgataggctataagggtagattattgaatctactctgaaaagaaaaaaaggggatatagaaacaggataaaaaggtagattattgaatttacttttaaactaagaaagcaactactagttttaactattttatattggcttggagtttttgtgtattgacacaaagttgagattatttttgttagaatatactatatatatatatatatacatacatacatatatttctaatcttgttcaagctattgtacctatgcaactcatttaataaggtaatgcaaatttttagcctttaaagttattattatcaactacttaataaaaaatgcaggttagtatgtagtcacttatcacaatcaaacttacagtcatatgaagtatatcttcaaggtaaaacacattttagatagacagggcatcttcaaacacttcagagatctgaagaatatgatatttaagatgttttaatgacatatgttctctctctctctctctctctctctctctctctctctctctctctgacaatacgacatgtttgctcctggcagtaccaatctacttcagagaaaatgggcatcaaagaaactccacatggagtttaccttctttgtggcaaaagttagccactatgcaagaaagtgttcttgcctacactgatgacagtatgctgtccaaattggacaagcaggacaaaagaaaggactgccaaaccttgccaagacaggatagcacagtccttcagaatatcctgcttcacagaaaagtctgtcagatatgctaggtctgtaggccaaagatggatgccccaaccctgcagaggaaccttgggtgactgtccagaaagccagttgtttctgttatttctcacatttttttttttggaagtctcttgcttgtacttcctgcttactcaggtctctgatggagttgaagactttacagttatagttttcctcgttgccagattcagaaaagaaattcactaaagaaatgtaaagtgtataaagttgagaggtagaaaaagatagttttcataatgcaagttaaaatagaaagtgaattaggtacaaacttttagacgcaccaagatagaatagatatggagtactttttctgaatttgtcaaatgttaatggactagacactgttgatgtatttattgcatatatatagtatatagttaatgtacttattgtatatagtttttcttatattagttataaccttttttatttttaaacaaaaaagtagaaatgtggtgatatcttgtttgtataacaaataaagcttgcctaatgaccagagggcagatctcgcctctagctaatcatagaggtctggaggtctatacagatagattgtcagataaaagggccagccaaagacacccactttggccctaataccagatccaactctgcccctaccaattgaaacatgaaaccaaccaatccctgagccagagcctttactctgaacccagagccagtgaaaaaaaaaaaacaaaacactttatccctgaacccagaaccaaagaaaaacatcctgactttgaaaccagtgctgaagaaacacactttgtccttagaatcacagccagtgaaagaaatacgccctggccttaaaattagagacaaaaggctaaaaaggaccagtgaaagaaacacagctctgaaattagagccatctctgcccagactcactaaactaaccaatccctgagcaggaaaactaacctgtctctgagtagaaaaacctctctccctgggaaaaacgtcttccctaataagtcctatgtaagcccctctgcctgttcagttgctggctgtcctttcccaccctggcaaaggcagtcactctcctggaatcctcctccccaaataaatctctttctcaagagtcttggatgaagatcttcattccttggtgcagaacagaagaacttgctgggacgttcccttaggggtactgagcaaggctgaaaagaacagaacagaagaaacttgccggaacatacccttaggggactgagcaaggctgcagcagaaaaagtaacaatttttctccagagccggaggagattgctacatttctgcagaggcttcccctttagcagactgtagccaaagagctaaagaagaagcagagcagggctcgctcggctgtaaaggctttctcggagaggagcaggattgctgtatcctgcggagagactaacccccattgcatcctagcttcaggtagcctggcttcctaacaagtcacaacacctttctctgcagggctgagatggccaagggctcccgcttccagagctgtcttaggtagcctggcttcccagtaagtcacaacacctttctctccagggctgagatgttctattgcatttccagcctccacagctgtctattgtggctctgggtagcctggcttcccaataagtcagggcaccctttttggttttttgtttgtttgttttacaagacagggtttctctgtggctttagaagctgtactagaactagctcttgtagaccaggctggtctctagctcacagagatccacctgcctcccaagtgttgggattcaaggcgtgtgctgccccccccccccttgtagctccagagctacatttacacttgcttatattttggtgcaaaatccagcactcccactcgcttacacagacaggaagtgagatgtttgggcagagaggggaatataggtgggaagagacaggaacttggtttctctcagtctgaggattttgtagaggtaagaactctagctctgcttctctgaccttttagctttcatcccctaacatctgactctgggcttttattattaaaacctattagaattcgtgttacagaaggctctgagttagattcccaaaaacttaaaaaaacaaaaaacaaaaaaaactacaaaagcctacacgaattaagcttataaagactatataaactaataattatatttgcaataaacacaatttttaaaaatttcatggggatacttgttcttaaacaccaaatcaagaagcattgccttgacacaactaaggaaaagcacctgaagaccatcactgatcataatttgaatgagtatgcagtttgaacacagtctttcctattgtggacaaaaccaacaagctctcattagcgagacaaagaagctaatagatgactcagtcagtaaagtgctttctgctccagttaaggattgaattggaatctctaggatcctgataaaaaaagttgggcatgagggatggagagatagcttattggttaaagagcacttgctcttgcagaggacccacagggtgactcacaactacctgtaactccagttccaggtgatctaatgccttctgacttgcactggcaccagtggtttgttggtcctcagttgggagctgtttgaggaggatgaggaggtatggctttgatgaagaagtatgtcactgaggataggctctgaggtgtcaacagacttataccgtttagcgcttgcttcttttgcctcctacttatggttcaagatgctagctctcagtagcagcaaaagaaaacacccgatttgacctctagcccccacacgggcacatacatgtgcatatattacatatgcattctctctctctctctctctctctctctctctctctctctctctctatctatcaagggggatctatcattaccttgcataatacacaatcttttgttgttgttggtttttgtttgtttggtttttcgagacaggttttctctgtgtagctttggagcctgtcctggaactcactctgtggaccaggctggccttgaactcacagaaatccacctgcctctgcctcccgagtgctgggattaaaggtgtgtgccaccaacgcccagctgtgaatcttttttaatgcatacgttgctcacagcccttttttttttttttacatggctctattactcagatatatttttcaaatttatgtgtttgagtgttttgcctacatgttatttatgtgcaggatgtgtgtgcccaatgcccatggaggcagaaaaggctgtaagagtccctgaaactggagttatgaacattgtgagctgccacatgggagctgggaaccgaatctaggtcctctgaaagagcagcaagagagcccttaaatcaagccatcactccagcccacacaactaagatcctttaaagactatggaaaaactgaacaggtttagagaaaaaacaaggagtaaaggacagtaaacagaagaatgaagaaaagtctgtaagaaaatgaaagcaatatgattatcaatgtctaaacccacagacaggcttttgaatagagaccctgaaaagctatttcccagtgcccacagatgactgaccaagaagagaagcttcataaaatccacaagattactgggctattgttcttcataagaagggctttttcttgactatcctaatgatgaattattgagatgagcaaataaatggcagatgtgttaaatcactgattctctgttttaactcagggtgtttatttattcatggtctactgacaactgtccctaaatcttgaatcagttacccaaaacttgaatcactgaccacaatttaaaaattctacagtgatatcctgctccccaacactgtctagccaccaaagccatcaatatggaaatgtcctagatctggcatccatgccaccaacaaactgctctggcttcatcttctctacaactcaacacaccagcaaccagacatctcactatccaatgacctaaatatgcttcaaccattttatgtccaccattcccttgattcatttccccacttgttacaatcttactctttagtattcatttatttagtagatttcttgattgtgtatatgtgtttatgatgtgtgtgggacatatgtgccatggtgtgaatgtggaggtcagaggacaactttgtggaaagcaggaagcacctttatctactgagctgtcttgctggcctatttagtaaattttaatttactagctctgtgccatctcaaatgccacctattaagagataaaatgtgtcctcagatcagtttaagtctttattctcagaaaggaacttaatttgaaataggaaactagttcattaagatgaggtggtatcagacagaggaggctcttaatccaatgatttttatctttctaagaaggacatttggacatagagatactgggatagctccactccacaaaggaagaggcaaacaaaaagaatcaaaaattaatgtaagctgtacatggcagcacaactccctaaccctggcattcagaggctacagcaaacaggcagaaggatttactgaagcctgaggaaccatgacattgttggcaccctaagttcacaatctagcctaggttttggtcttcaaaactgtaagaataaactttagttttaagtcaccgagtttgtgtctctgtaactgaagcccaagaaattaatacgccacctttcaccttttccatttcccaaattcccacagcactgtgttgttttatatccagagactgtcttgtgatatagtctagctgaactggaactcactatgtgacctagaatagcttcaaacttatggtacttccttttcctgcctcagtctatcaagagccgtgactctttcccctccttccatgttcacaggacctttctagatgaacttttttctggaaagcagaaactattgatggccctctgtacctaagagtactgcattaaaaaaatagaaaattacatttatactaatttttttctttttataagtctgtaaacaccacaatataattaattatatagtattcatactgtattgggtattataaatattctacacataatttcaagagtacaggaggatacacagaggttaaatgcaaatagggcagtattttctatagggtacttgagcatctgtgggttttggtatccaagcgagtctgaaatgaaacctccatggacactgaagcccaaacacattcatactctgtgcatggctcttaacacctggcctgtattcaatatacactgaccaccagtcacattccctaaccaacacacttattttcatctgaatggttctgagtgcatcatctccatatatgctgacaagttaaacacggcacaaaaattttctactgaaaattcttagtttttgtcttcttggtgcctttcaacagtcacaacaaccactctaccactgagctacatatccagtccaaagatgctatttcttaggaaacattcctagattcatagctacttattatgtcaatacacaagattgttatgtacacatactgacttagctaatgtccacaatggaaaaggatgtttaaaaaataccttattgcggaaccacttcatttgacttattctcttctcactatctaggccagattgcgtagaaaatagaaaccctcctgcctcaggctcctgagtgttgggattatagacatgtaccatggcacctaggtcttgattctctcttagtctttaataaaacatagtttacttaaaatctttccaactttgctagcatttggtgggtaatgatggtacttttgaatttttccaactgtttaaattctttaagtctatattttataggaagaccacagagttacttccataaaacattaaataaatatagcaaagaagatggtgaggtgctcagcaggtaaaggcactagttgccaagcccagcaacttaaattcaatcaatccctggggctcaatggtaggagaaaatagatttctacaagttgttctctgacttccacatccatgcacacacacaacaaaaacaataaacaaatacaattaagaaataataatataagaagggacttaacctaatgaataatttcgcaaatagtaatctgattcacaaattcaccattatttcttcctgagacctctgtttgagctttagaaaatgtaaatgggcagtgtgaaataaatactcaacaggtttagtattaggtaaatgagatggctaatgagaacttctgttgcctttgtgtgcatactggggatgctgaagttagacactgatatatacagaatataaatacctatttatagagtaagtacccttcaaatttgatggacattagtattgatatatatatatatatatatatattattattattatgcatagtgttctggctacaggccagaagagagcaccagatctcattacagttggttgtgagccaccatatggttgctggaaattgaactcaggtcctctggaagaacagccaatgctcttaaccactgaaccatctctccagccctgatcattagtattattaactgggacaagttaatattattagctgatcactattctaaatgatacagaataggaaatccctcacaattatgtattctggtttgtatataaaatacagcataacaaactgtatggctgccatttactccttccaccagtagggtttattccctttatgtacttatccatacatagctgtagacatttattaaatactttactagttattatctggggggtgctcaaagggctgtcagatctgaaaatggaattacaagtagttgtgagctgcctgataagggcgctagaaatcaaattcaggttctttgcaagaacaatatacattcttccttgctgagccattgctccaggcttagaaatttattaattaacttagcaaatatttgttgagctcctaagcacccaacatatgtattttttagaataaactaaagtagaaaaagatcaaatattttaaagtaaataaatatgctagattacacagtagacaatggcaaggaaggggagaatgtaggagcaacccttggcccagcccccaagaagcactcagtctaatgagcatcaagggaataaaccggctctatcatttccctttctctccatgttgatcgagtgcttcacaaaagggcttcttctcctaacagtcagatttcattaaaacactaaaaactttttttatatataatttttcaagacagggtttctctgtgcagctttgtagaccagaaaagatggccttgaagtcacagagatccgcctgtctctgcctcctgagtgctatgactagaggtgtgcgccaccactgcctggccactgaaaacttttctgatggcttccactgtttagtcaatcaagtcaaactctccaaaatgaaacagaacattcaaaatcttccacaaaccagatgtgtggcataaacctataattccacaactctgaagagaaggcaggagaatctcaaattcaacactaacctgggctccataacgagaagctgtcttaaaacaaaacaacaacaaaacaaccaaaaaagccttccatgatccattagcaaatgcacaaattacgaagacagtatttgcaactagactgtcagaatgcaaatttattatcaactgttacctctatcttttgcttagtctataaaaaagggggttttaaaaaccaggcttcttcactaagttattatgaggatcaaataaaatacaacttgtgaaatgatcagcacctacttagcaaacagtaaccatgctaaaatatgagtcctaccactccttttaaaagttttacctatcattgttgctgccattcaatcttcatttcgaaccttatctccaaaaacactgtgtacaagcctgttttccaggcaaatggaactagaactctttatttgttggagtgtgagtgtgagtgtgtgtgtgtgtgtgtgtgtgtgtgtgtgtgtgtgtgtgtgtgtaagtcagaggacaggttttttaggtcagttctctcctactttaaggtggggcaagtgcctttatctggtaagctgtctcacaagccccaaactagactcttaccataccctaacacaaaccactatactcagggttcatcagtgcatcttcatgtactaagattctcaccattcttgaggctctatctcagctccacaatacattacagacactcaccacacaaattctgctagatttatcttgtagacttggcagtgtagagttctagccagtttgtggcatttacggtagctcttaataaaatgttcaaagaatgaattcctgcttcccctctcttgtggaactgttacgacaaccgctccatatcacaagtacaaagacttcttttgcaatattttgtaaagctggctagcaagttctctatcaccagtgtggtaatttctaatatagcacagtacccaaagcacagtagatgcctaagtatccagagagttaaactgaatttcacttcatcttataaattaaattctcattttgtttactgtgttcaagtacagctcagccctttaaatatatgttattatttaacctgtccataaacccatgtctattttcagtcatttcgaccttatctcatttgctatttcttggttaagagagacaatatccaaaattccaaaaaagaaaaaattagaaaattaaatgtctatagaaccataaaacaagcaagagagcttcagaacacaaagaactagaaaatacatctgcctacaagttttgctgcgtttttctatgaaagaatatgagcctggtattgacagatcttccaagttttcaagacaagtcagaaattcagaagtttgtataaaattttaaagacattaccaagagattccttccaataatctccacctagttctcaatcatttttaactaacctgagagccaaatacatgtggcaatttatttaactatgatgagtccctactcagtgccaggtgctggaaaatgagacatgaacagtagctataaatagcagctaacatttattgaacattttgtaggtgccaggcactgttctatgtgttacaggaattaatttaacccttttaacaactctactaagtaagtactactatctttattttaaagatgaggaagctaaggcacaaaagttacataaatctgttccaagtcatgcaattagtaaacagcaaagctgaaattaggaccttagattacacccaaaaacctaccatttgaaagcaagcactattcaatatttagtactgagatcactgattacacatagataaaataatgaaactgcatctcacctcatcccacacacaaagtggatcagagatctaaacattaaaggcaaaacagttgagattctagaagataatgtacacagtaacttaaaaatcctgggagaggatatgattgataaaactgaaagtaaaattccaaactttcagcaaccttaaacagacttattttaatttatttaaatacttttatgtgtataattgctttgcctaaatgaatgtatgtgtaccacatgtatgcagtgcccagggagaccagaagagggcaccggatcccctgaaattagacggttgtaaaatgcaaagtaggtgtgggaaactgaacctggatcatgtgcaagagcactgagtgctcttaaccacccagccatctctccagcaccctctcaccttttttttctccccaatactaaggatcaagcccagggcactgagtatgccaggcaaattttgtcattcagctatgtattctcaactttcggagttttaaaatatatattacaaactggaatatgacatctgtaatacatatatacaaggtttaataattagaatatgtaaagaaacacttccaaaaataatacaataggaaaatatatactctaactgaacaagccctagctaggtataaattgtgcaaacctaacactaccagagttaacccattcagcagactctggaacagtcaatttgctatcactgaacaataataaataatcagggctctatgtcatgttgcaggtactacagagtaggaggggaatccagcgagaagagcagaagcaagatggcaattctccacagttagagaaactggatagcaagtagagggtgaacagctaatgcatcaaaagtagatcaagtgatgaaaaacttttttaaaaaggtattttcaactttgtgagctgatataaattctctgccacaactgctcaattcagtcactgggagcacttacagccatagatgctatgtaaatgagtgtggttgtattccaatgaaacattacttacaaaaacaggtggttggcaagatttgacctatgagctagtttggtgaatcttaatataggaagctataattcctacactctaggaacactttctgcatcttattttactttttatgtccgctgacacctaatttttctaagcaaaaactatactacacttaacagcttttgaatggtaaaaagcaaaacaacaacaacaaaaacctctcttatctgtgacaattttccgatcatttttatttcactgaaaaaaaatgtttttgacaatcatccaaactagttttaaaatgccccttatcaatcacagtatcagttatccatacctagaatgtctaactccgctcaaaatccactctgaaccttaatttaggactttattatttctttcctttctcttcagtctatcattcatatcttaaaagaacatccattgtgctgagaagctagctcagtccttaaagttcttgttttccaggcatgaggacctgagttccatcccatgaaccaattaaaacaaaatagacaacaacaacaacaacaacaaaataggcaaaatgcctgcaatctcagtgctgaagaggcagagacagacagaatcctggggtttgctgggcagctggccaaccctacttggcaaattccaggccatcaagagaacctgtggatagatgaatggatggacagaaggaaggacggacggacagcaggcaagcaggcaggcaggcagatacggatgcatgcaaagttaaatagtgcctgagaaatgacaacagagattgaactctgggttctacatatatgagcacacatacacacacacatacacacaaagagcacccattcaccttttaaaaattaaaccttataatatactcctcctgtctaaagtcttgtctcctcctcacctgaagagggttcaagctaacctcctcagtcacacctttaacagctttcctcatctcgtctctcaccatacttgcacatacactgtgctccaccttattcaaggtacatgtctttgaaattcaagttatctcattcatcactacatcttatttttttaatgtgctggtaacaaagtaaataaagggctcggaagatggctcaggtggtaaagtgcttgtcacacaagggcataaggacctgaattcaaaaccctagtccttacataaaggcagcatgctaacagtgcacatctgtaaccccactgcttgagggtaaagactggcagatccctggagctccttggctagtcagcctagctgaatcaataagctccagggttagtgagagaccctgtctcaaaaaataaaatggttgagactgtaaaatggctcagcaggtaaaggcactctatctgtcaatcctgatgacctgagttctggcatacccacataagtggaaaaagagaagtgatccccacaagttgtcctcagattccacacacatggccccacacacaaataactacagaaaataaaatgtcaaggtaaaaaaataataaggtagagaaacaatcaaggaagacaccaaagtcaacctctggtctccccatgcatatgcacaaactcgataagtactactcctccacctcctccacacacacacacacacacacacacacacacacacacacactctgcaaggggggaatagttcagtattgcaggcttacctagattgagcaagaccctgagttcaatccctaccaccacattcacaaataggtgtacagatacttcagcataaacaatttttatacttagtaactatttgaatgtaactagtttcctttgtaatcaatgtcatttactttatacaattaaaaatattattttgagagatccatgctacagggaccatggcacacataagatcagatctctgcattagaaagactcagaaaaattggtactgaatatacatgtggttttgaaaatccttataaaattcttttgattaaactccatcccttttgtgctgggaataaaaccaaggcccttatgttgtatgctaggcaaacactctaccatttaactacaatgccaacacctgaaagtctattttttttcctctggaggcagggcctttactctatagcccagactctcctgcctcagtctcctatgtgttgagatatagatgtgaaccaccgtgcctggcttctaagtttgttttgttttttaattatgtggagttttgtattgtctgtcattccttggtatatccatgggcaatggattctaggacctcctaggatatcaaaatcattatataaagtgatacaatatttgtgtatcctgtctacctgtaatagccaataaaatgtaaatgtcatgtaaacagttgttaagctgtctagtttagggaataataataacaagaaaaaataacagtgacaaggaaaaaaccctgtatgtttagcacagtttcaattttttgttttatgaatgtttctaatcggtgattggttgaagctgtagatgcaaaactcagggacattaaaagtcaactatatatcactggctgatttatctcatagtccatttgaactctcaattgcctatttataacagaaattcaattaaagtgaatatgatggggaccctaggtctctatcattatccttttttccccttttaagctttttgtgttcttttgctgtgcaataaacatccagacgagggggaacatttttttaaactctagaaagaggttctttcttgatgcttttttttttgtatcaatggagatctaggaaatatccaataattgattatacatttttgtatcccactcaggctttgtactgacaaacttgttaaaacaaaaattaatgactctgataatttaatggagtttgacttagcaactgaatgaggaagccttagtccatatccaggagcctctgtcaccgacacaaactatcttaggaaatcaattaccttggctaaaatcactacttgatttgaaaccatggcatgatctctgtaaagccaccgtagttattacatgtcctttccttcttcacgattctgactagtttcaacaagacctttcagacgacctccccaggtgaccctgctctttaagcagcggctgtccccttccaggaaacacactttgggtcaccgcccccaaacagccgggtccctccttttaaagacaactccttaagttgatggaggttctctcctttcctaccagttccactctgtaccttttgctgtccagctcctacatccagcccctgcctggcaccctttctttcctcatcaagctcttcccttttcctgttgctgcctccaacgggactggaggctcctcagggctcacaggtcccgagacccttgggagtcataaagactggccattcagtgccaggacccttccaggctgattcccgcgtcggtgacccactctgatccccgagttcgcaacccccattcctaagcaatctcctccagcgcacgcaaagaacaactccagccctgacagccaggactcggcccccaagctgcctcccctacccctggctgctgctctggggctcggttnnnnnnnnnnnnnnnnnnnnnnnnnnnnnnnnnnnnnnnnnnnnnnnnnnnnnnnnnnnnnnnnnnnnnnnnnnnnnnnnnnnnnnnnnnnnnnnnnnnnnnnnnnnnnnnnnnnnnnnnnnnnnnnnnnnnnnnnnnnnnnnnnnnnnnnnnnnnnnnnnnnnnnnnnnnnnnnnnnnnnnnnnnnnnnnnnnnnnnnnnnnnnnnnnnnnnnnnnnnnnnnnnnnnnnnnnnnnnnnnnnnnnnnnnnnnnnnnnnnnnnnnnnnnnnnnnnnnnnnnnnnnnnnnnnnnnnnnnnnnnnnnnnnnnnnnnnnnnnnnnnnnnnnnnnnnnnnnnnnnnnnnnnnnnnnnnnnnnnnnnnnnnnnnnnnnnnnnnnnnnnnnnnnnnnnnnnnnnnnnnnnnnnnnnnnnnnnnnnnnnnnnnnnnnnnnnnnnnnnnnnnnnnnnnnnnnnnnnnnnnnnnnnnnnnnnnnnnnnnnnnnnnnnnnnnnnnnnnnnnnnnnnnnnnnnnnnnnnnnnnnnnnnnnnnnnnnnnnnnnnnnnnnnnnnnnnnnnnnnnnnnnnnnnnnnnnnnnnnnnnnnnnnnnnnnnnnnnnnnnnnnnnnnnnnnnnnnnnnnnnnnnnnnnnnnnnnnnnnnnnnnnnnnnnnnnnnnnnnnnnnnnnnnnnnnnnnnnnnagcgagcatgtgagccgaggtgctgggtgcgatcttggtctgcgtgcatgttcagcgctgtcccagcggctggctgtgtgtgctgcgtaacgctccacgcctcagtgtgctctccccagctatggggatgatagtatttccttgcgcagaggaaatgagggaaaggcttggaaagcgtctaatgactgacgataaagataacctttattctatctcccccccccccacttcgtcccaccaccctaacaaacacggtaggtgctcacaaaatagaactggtgagtgaacaggtggaggcgggcctctggcttcctctcttcccaaagcagggaagtgttcttagcactgggctgagcccagagtcacttaaatcagttcccaccccttagcttcatgattttctttacctctgtgtctcagcttcttcctctgtaaggacggttggggcaggtggattcttaacggctcagttatagtgtctcatctaagagaggactctgaaacgctttctttccacgggtatttattgagtgcacactgtgcacatagactggtatgggtaccacccttaccagcaccgccagcgtgcgccactatttttcttgctagtaatattcctccgtcagaattctgagcgtgccactctcttactaaaaatgattcgacagaatctaggggtgtgtgtgtgtgtgtgtgtgtgtgtgtgtgtgtgtgtgataaaagctgcagagtgagaactatttgagggcagaagggatgggagaggtaatgcgaagtaactataagcgtgatacgcatgtatgaaaatctcatgatgaaacctattaataattattttaaagatctatttatttttatgtgagtgtttttgcctgtgtgtgtgtgtgtgtgtgtgtatgtagcacatatgtacatatgttctccacacgtgtatatatgtgcaccacacacttgtgcctgaggcctgtggaggtcagaagaggtgttgggtcccttggaattggagttacagagagttgtgagctgtcatctgggttctgggaatccctgggtcctctggaagagtggccagtgctcttaactactgagtcacctctccagtccctaaaatcattttttttaattaaaaaaacccaggcaggcaagattggttaatagataaatgcacttgtttatcaaggctgacaagctgagttccctcagaagctcacacgacaggaggaaagaaatgactcccacaagttgtcttctggccccttagcatgtatatgcctacacacatgtgtacaggcatacacacacattaaatttttaaagatattttacttggtatatgagtgttttgccagcatgtgtgtgtgtgtatgtgtgtgtgtgtgtctgtgtgtgtgtgtgtgtctgtgtgtgtgtgtgtgtctgtgcgtgcgtgcgcgcacgcggcataccatgcacatacctagtacctgcctgtggaggccaaaagatggcattggatctcttggaacagcagttatagatgtttgtaagcctccatgtgggtgctgggaactaagccactggactatctaatgccatacagccattttttattgttctatataatatattttatgtatttcttttttatttatttttttttcattttacgtaccaaccccagttccccctccctcctcttctcccactcttccccaccttccctcttcccacctcctatccactcttcagaggggggtaaggcatcccttgggaagtcaacgaagtctggcataccaaattgaggcaggaccaagccccttcctgctgcatcaagtctgagcaaggtatcctaccatagggaatgggtccaaaaagccagttcatgctcctgggataagtcctggtcccaccaccagaggccccacaaacagatcaagccacacaactgtcacccatattcagagggcctagttcagtcccatgcaagttccccagttgtcagtccagagaatgtgagctcccactacctcaggtcagctgtctctgtggcttctcccatcatgctcttgactccccctccttgctcatatgatccctcctctctctcttcaactaagttccagaagctcagcccagtgcttgagtcatgcatccatttttaaaatgtaattaaaaaattttaaacccattcaacacctctccatttctcttaagctaaaggacaaacaaatctctccctggtgcagtcattgcatcaccagtcttattttggggtcctctttccttccctctggctccctgtacatgctgatcccactgcctgagattctctctcacatagcgaaccttcatgtcccaggtcaaacatggctacctcacggatatgatctctccttgcacagattctcttggcagcatggacttatcaactgactgcactagactgtttattatctttgccactaggctggactcactatgttggctgctgtttctgctgtaaatagcacgatgtctgttagagagtaggtactgggtgagtatttatgtggatcccatgtgtcattctatgtactaggctcaagatcttaaaaagatggagagcaacaggcaggccaccagggtctcgcttatgtagccccgtctggccttgaactcaaagattcatgtgcctctgccacatcaatgctgggattaaaaagcatgtacaaccactcccaagccttttctttgttaaaaataactttttatcatggtattttaaccacacaacataataggtttcattatgacattttcatatccatgtatgttatacttggttcctatttactccatgtcattctctcttgtaattctccttcctttctctggccccctttctcttcccaaatagtcctctttctacttgtcatttttttaaaaaaaaaatctaaattctacatatgagagaaaacttgcaatattgtcttttctgagtctggcttattttacttaacaaaatgatctctagttgcaatcactttccatcaaatgacatggttttattctttcatttttatttttaattcattttaactttacatggatttagctagggagagggtgcttgcgcctctgtgtgtgtgttgtggggagggtgcccaaagaatctagaagagggcttcaaattccctagagcagttgaattcgggtcttctgaaagagaagctagtgcttttaactggtgtgtcatgtctccatctcctatttttatttttattttttaaaacaggacatttatatattcctagctagcctagaacttattggacccaaactcatggagatctggctgcttctgcctctcaaggattgggattaaaagtgcacttctatattcagctgatttcattctttttatgactaaataatacttaattatgtattgcaagaacttgggattctagactgattacatagtttgaccattgtgaataataccacagtgaacacgagtgtgtgggcatctctgttgtatattaactttgactctttcttaacttattaatttttttttacattccaatcccagtttcccctcactcttctcctcctgctcccccaactctcccatctgcttctcaaagagggtaaggcctcccctaggaagtctactaagtttattccatcatcatcttgagacaggatcaagccatggctaggctgagcaaggtatctctccatagagaatgggctccacaaagtcagtttgtgcattagagttagatcttggacccactgtcggtggcctcatatattgtcccagctgcaccactgtctcctatattaagggagtctagtttggtcttatgcaggttccccatttatcagaccagagtcagtgatctctcactagctcggggcagttgattctgtggtcttgactccttttattatcactcctccctcactttgattgtactccaggagctcagcccaaaggttagttgtggattcctgcatctgcttccatctgtttctggaagagggttctaacttccctggggttgtgaattgtataggctgtgtatcttttgctttatgtctggtatccacttatgagtgagtaaatactatatttgtcttcctgggtctggattatctcacttaggattttttttttagttctgtccatttgcctgaaaatttcaggggtcagtgtttcttactgccaagtagtacttcattgtgtaaatgtatcacattttctttatccattcttctgttgatggacatctaggttgtttccaaattctggctattacaaataatgttgctatgaacatagttgaacagatgtccttgtggtgtgaatgtgccttctttgggtatatgcccaaaagtggtattgcaggatcttgaggtaggttgatccctaattttctgagaaatcggcatactgatttccatagtaactgtacaaatttgtattcctaccagcaatggaggagtgttccccttactccatatcctttttggcataaactgtcatcagtgtttttgatctcaaccattctgatcagtataagatggaatctcagagtggttttgatttgcatttccctagtgactaaggatgttgagcatttccttaagtgtctttccaccatttgagattgttctctgtttagatctgtaccccatttttgaattgtattatttgttagtttgatgtctagtttcttaagctatttgtatattttggagatcattcttctgacagatatggggttgaagatcttttcccattctgttggcagccattttgtcttgttgactatgttctttgctttacagaagcatctcagtttcaggaggtaccatttattaattgctgctctcagtgtctgtgctaactggtgatctatttaggaagtggtctcttgtgcctattcattcaagggtattttccactttctcttctatgaggttcagtgtggatggatttatattgaggtctttgatccatttggacttgagttttgtgcatggccatagatatggatctatttgtattcttctacacattgacagccagttatactagcaccatttgttgaatatgttttcttttttccattttatatttttagcttctttgttaaactttatgtgttcataggtgtgtgggttgatatcagggtcttcaattccattccattggtccaccttggtttttatgccaataccaagcagtttttattactatggctctataatagagctttgaagtcagggatggtgatccccccatatgatcctttattgtacagggttattttggctatcctggttttttgtttttccatatgaagttgagtattgttctttcaaggtctgtgaagaattgtgctgggattttgatggggattgcattgaatctgtagttaaccttgattcttttagttaggtttacataagagttgtatagctgaatcatatagcagaccttttattacctgtttgaggaacattcacactaatttccatgatgactggattaatttatgttttcattttataaaaagttgtaatttatatacagtaaaataaaaaaaaccttacacatgtacctaatatttttgtggtcctaggaatttgaactcagcaccttgcacatactagataaatgctctcccactaagctatatccctggtgcacataataagtcttttacttatgttcctgtggtaccaccactccaatcaagttgcagatcagttaatgcatcaagttcccttttgtttccttccagtgaatgtccatcccattagaagtaagagttatccaaatttctagcatcataaacttattttgttaattttgggggctgggcattggtggtgcatgcctttaatcccagcgctcgggaggcagaggcaggcagatctctgtgagttcgaggctagcctggtctccagagcgagtgccaggataggctccaaagctacacagagaaaccctgtctcaaaaaaccaaaaccaaaacaaacaaacaaacaaacaaaagatttgaagtgatgagattgttagtgcatatcaaacatggagaagatgaactggtgccttaccagacacttcacccctgccgactagcatttatggtgttggaagtcactctgcaggatacagagaagaatggtaatcaccaatccagccataaacctacaatagtgacctccctgagagatatgctggtatagcagcggcacaaacaatgtgggagtaaccaaacactctctgattggatttaaggccaatgccatgaaatggaagccatgcctgacacttcaacaaccggccacagatctaagggaaaaccaactactgttgttgtgctgaaggaacatagcgacaaaatgactcctaatgtggggctggagagatggctcagtggttaagagccctggttgctctttcttccagaggttctgagttcaattcttagcaaccacatggtggctcacaaccatcaataatgggttctgatctcctcttctctctgataccctcttctgccatgcaggcttgcatgcaaattacataaaataatgaataaataagtcttttaaaatatgactcctgctgggtgttggtggcacacacctttaatcccagcactcaggaggcagaggcagttggatctctgtgagttcaaagcaagcctggtctacagagcgagttccaggacaggctccaaagcaatacagagaaaccctgtcttgaaaaaccaaaaagaaaaaagactcctaatgactttcttctatatccatagatcagtgctttactcagtcatcaccagagaggcttgcaatagatgggaacttacacagacccacaacttgacaatttacagcgagtgagagatatattgcagcattcagtactaaatggcatgtcttcatcaaaccctccctgtagggatgagagactgtgagaagggaggtggaaagattataagagccagaggggatggaggggtttaaagaaacagtgtcttccctccagacacaataggaccaatgcatatataaactcacagaaactgtggcagcacaaacagggccagcacagattcaagctagatgggatctcaggatgacatggggaagtggacacaggctcctactcctaaccaaggagctatctgcaattgataccagcttgcaaaagaaaaattagtcttctaaaatgggatctcactggatatagtggctcatgcccttttaatcccagcacttaggaggcaaaggcaagtggatctctgtgagttcaaggccagccagagctacatagtgagaccctgtctcaaaacaaagcaaacaacagacaaaaaatatttgaatttagaatttaattgggaactggtgatgactgtcagcaataaatctacatcttgtgtggaaaaaataacaaataaggttggagcaacaacatctcactgttttcagggccaaatgacgtttagttgggtgagtagtgccctataggacattgtaccgtgctagttccttgatagttgaccagtaggtggcagtaaagtgccttgatacacagtcaaatgaaggagtgcctccttaagggaagcactattttatataaaatttatactataaatgcttaacatgggggaaaatggaagaaaggattaaaatggaagaaattgataactacatgattgaaaaaaaactgaccaccgtcaagaagtgacctccctgaagataggtaatcttagaattcaaatatctgtttttaaaaatgatctgaaattttaaaactaaaacaaaaagactttatttttatttcacatatagagtgttttccctgcatgtatgtatttggatctcatacatgcagtgtctgtggaggccaaaagaaggcatcagattccttggaattggaattacagttatgagactgagtgtgggtgctgggaaccaaatccagatcctctgcaagagcagccagtgagtgacctaaacccctctgaaacagttcttgagttccctgaaaattttaaacttcaaatagcaatgatataaaggcacacaagtgtacaaatcataaatcttatgagtcttcccaaagtacaacacacgtccagtcagcacccacatgaagaaataagaaatgggctgcggagacagcacagctaccaagcctggtgacctgagctccagctctggcaccatatggtagaaggaaggaaccaatttgtgcatagcacgggagcaggcacacatacacacacacacacacacagagagagagagagagagagagagagagagagagagagagagaagaggagaggatagggagaaaaggggagggcgaagggagaagaagaggtgtgagaacatgcattatgagcaccataaatctactttcaaggccggacgttggtggcgcacgcctttaattccagcactcaggaggcagaggcaggtggatctctgtgagtttgaggccagcctcatctccagagcgagtgccaggataggctccaaagctacacagagaaaccctgtctcaaaaaaccaaaaaaaaaaaaaaaagtactttcaagttaccttctagaaattactaggagtccccttagggtaaacagaattctaacgtctcactctacagattaggcttgacagttcagttttacatgctgtaaatgcactcacacagaaggtagtctctgaatctggcttctttggctcagtatttatatttttgagattcctctatattgttgcatatggttgtaatttatcccatttcgttgctgggtagcctttcactatgtgaatatattatggtttaccagttctgctgctgctgactgcttttgggtttctcactttaaggacagttttgtttttgtttaagacagtgtctcactatgtagtgctggctggcctcaaattcacagagacccacctgcttctgcttcctaagggttgggaggaatatctagcctgacatttttgtgcatggaatagcctaagaaatatgcttcttttaaaaaaagttttttgtggggctggagagatggctcagcggttaagagaactggctgcttttctagaggacctggtttcaattcccagcacccacatggcagttcacaactgtctgtaaccccaattcccggagacctgacaccttcatacagacatatatgcaagcaaaacaccaatgcacatagagtaagagtaaataaatcgttaaaatatttttttaaaaagttttttgcttgttttgttttgaaaagcctctctgtgtttccctggctgtcctggaatttgctatgaagaccagactggcctcagatttacagaaatccacctgcctcttcctcctgagtgatttttttgttttgttgttgttttgttttgttttgtttgagtctgttcttattttatatgttttgcctatatttagtgtgccatgtgcatgcagtatctgtggaggccagaagagagccaaaactggagttagagaaaggctgggaacaaaatccaggccctttgctagagcagcaaatgcccttaatcattgagtcatctctccactctgttctgttaaagcttgttaaagtggttgttccagccactgccgacaacacagaactgaagtacttgctactgctgaattgtccgtttctcccttcatttctgaatgttctgcttcatgtatttaagaccttgccccttatgtctgacagttttgtaagtgtatatggtgagttttagtctccactctattatccgttctgatgctacatctttctccccgacagccttcttctttcccacaaatcccctcctacttgcatgtcttttatgtgtatgacccaatgagtttaattagggtcgccttcatgagcataggtggatggaagattgcttcatgtttttgattttttattggcgtgtggatggtgggtgtcatacatgcatgtgagtgtgtaggccgtgtgcccatgcacatatgcaaacagagaccaggggaagacatcgggtgtcttcctccatggttcttcattgtatcactctctcactgaatcaaaagttggatgttttggctagactgacgggctagtaagcatccaggatccacttctctctaccccacaatgctgggttcataggcatgtatagccatgcccaactttttacatgggttttggggattcaaactcaggtcctcatgtctgcgcaacaagtgttcttacccacccagccatctccccagacctatccttcatagtttttaactgttagtaggatatgtgtatatgtatatgtatatgtatatgtatatgtatatgtatatgtatatgtttgcctgatgggttgattctcttatctttacaaaatcatcttgatctctaagtgactttttgttttacagtctattgtgtctgaatccaatactcccagttccctttttttctcctatcttcctctttttttttctttcttgatagtttttcattctgtagctcaggatggcctagaaatcactttgtagtgcaagctagcttcaaactctgtgtgatccccgtcactatctctggagtgttgagataataggcatgcaccaccaaagctggatcctgtgtacatgggtattttgtgtgctcatgcacgtgtgtgtgtgtgtgtgtgtgtgtgtgtgtgtgtgtgatgccagattcaggcagaagcaaagagcaagatcctggggaactggggttacaggtggttgcaaactaccatgtgggtgctgggaaccaaagtcttcctccggaagagctggtagtgcagttagccactggggcatctcgccagcccttccttgtggcaataccttgtttgtactctaacaaataaagcttactagttaactagtggagctagccactagttaaccacagaggccaggcagtggaggcacacacctttaatcccagcgtttgggatctcatgcctttgatcccagtacttgggaggaggaaaccagaagtcatgtgagagaggaacataaagttggtagacacaggagctagccccttttcagttgcctgctttgcttctctgatctttcagtttttcacccctaatacctgactctggatttttattattaagaccaattagaactcgtgctactgttccttccttccttccttccttccccttccttccttccttccttccttctttccttttttccttccttccttccttccttccttccttccttccttccttcctccctccttccctccctccctccctcctcaccttttttttttcttctgtttttgagacaaagcctcactatgtagccctggctgaactcactatgtagatcaatctggcctcaaactcacagagatccacttgcttctgcttcccaagtgctgggattaaaggtgtgcaccaccacactaggcctctaaattttttatagtatattcacatgagatatttttcctcattattttagacctatttgtatttttgagtttgaagtgtgtctatttatggacattgaactgctggatcttatttttctacccaaatgatgaggttccttgaccagtttgttttatccatccatatttaatgatactattttgcagtacaggggctcaaacccagaacttcatgcataccagacaactgtcttactacagaactacatccccatgtatttattgacttgatgaatctttgaatgatgtaactggcccagattattttcttctaattgtggaaatatctctgaattaaaagaagaatttgtaagaatcaggcctataaaattgattagtgcagtaatgatcatttagaactctccttaatattaacaaaggactagagatcctcaaatagctcatctcagttgataagagtgcttgcctagcatgtatgaaatcctaaattttgtccccagcattacataaactaggtgtgatgatggcatatgactataatctaagcacttgggaggcagaggcaggaggacagaagttcaagattgtcctcaactgcacagtaaatttgaggccagcctgggacactgcctcaaaaaaaatggtaagggaaataccaaaaatcaataagcaagtacttttaactttattatttgaggcctcagagaatattgcaacattcttcaaagttccaagtctcttatttcatttcatagttagccagttatagtcttaatatgagacaaacttttcaatgttccttatgccatcacaagacagtacagtctaaataaaatgacagtgattaggaacagaggatcttggtgtgcaccaatcttgtctttgtcactggtgtctccagtgccttgggccatgcatgacagagtagacacataataaatttagtggaataaaatttaatgttccacgcattcaatataccgagcaataagggggctttcccttctctctctctctctctctctctctctccctccctcccnnnnnnnnnnnnnnnnnnnnnnnnnnnnnnnnnnnnnnnnnnnnnnnnnnnnnnnnnnnnnnnnnnnnnnnnnnnnnnnnnnnnnnnnnnnnnnnnnnnnnnnnnnnnnnagagacacttgctgtgtagcccaggctagccttgaagttatgatccttctatctcagtctcccatgtactaggacagtattgaaacagacttcccaagtcatcagaattttaacattcaggaatcttagctggatgcagtggctcatgcctataatccaagttcttaggaggcaatggcagaggactgctgtgagttctagcaggcagagaaggggggaaggtggcaattgtgaaaatacagttccatttttactttttaaatataatctataaatgtgtagaaaaagagaataacatgtgctaagttactgacagtgctattcttggaaagtgagttctttaggagggtagatgaactaactatattatatatttctgaaatatctgatatttgaataattgttacatctgtaatatatgaggcatagtatagagcttattgtgatgatattgtaccttataggtatcattagttccttttgcttgttttgtatttggtggtggtggagattgaaccaagagcctcgtgcctgctggggaagcgctctctaccactaagccacttctgctgcccagtgtctctcaccttactgtttgtcttgtttaggactgaggtctagggctggagagatggctcagccattaaagctaggctcacaataaaaaatgtaaggactgaagtctattgcctgaaatagtggtttgaatgagaatggcccccatgggctcgtatgtttgaatatgtagtctccagttggtggaactgtttgggaaggataaggtgtggtccttgtgagaagagttgacactgggaaccagctttagggtttcaaaaatatcccaacaattcctagtgctgtttcttacctataaatcaaaatgtgtgatctcagctgctgcttcagtcacctgttggcatgctatccctctgacatcataaaatctaaccctctggaaccataagcccagttaaactctttttttttttaaagattttatgtatttattatgtatacaacattctgcttccatgtatatctgcacaccagaggagggcaccctgcctcattatagatgttgtgagccaccatgtggttgctgggaattgaactcaggacctctggaagagcagtgggtgctcttaaccactgagccatctctccagccccccagttaaactctttaagttgtcttgaacatggtgtttttatcacagcaatagaaaataactaagacaggaagtacaaatggcattatctatgaaagatacttgtctgttatgtgaaatattgttcatagcaaacaactcacctagtagttgtgaaacaggttaagaaaacgagttgtagagtcagacatcctgagactgaacccaaccaagttcttctgtttaataggtaagaaactttggacaagtcctttacatgactgtttgcccatatccccatcaataaggtgacaatagtatttgtacctaactcatgaggtttgtgacaaagattaggtaagattattctcataaagcacttagcattaaatgcttgatagatatctacaatgaagttattattttttattactagcacaagttttggaaacacaacccctgaaagttgatttcaggttgtccttgttgtcacaggcttctgagatggggtgagccaaggtttcctctctcattcccaaccccacatgtttgagcatttggtccttaggtgggcatgctttgacatttttggaggttatagaacccctgaggaggacctagctggaggaagagggtctctagagaataaggcttgagatttaattactgacacccttatcctgatgttatctctatttcctggtctcccttaggtgtaagcaagtttccctgtcatagcttggagctgttctgttgccatggtgtctttgcttgagggaccagatcctctcaaactgcaagccaagttaaatcttttctctctaaagttgcatcttgtcaggtgttctatcaaagcaatgaaaaagcaattacaacatcatttagacagagatcaagccagagtcatggttaagcaatattctttctttaattcccctttgcaaatggaagcccctgagctgatacccacccccacccctacccgactgcctggggaccttcaagtgcaaggcccctgccttaacctggtggacggggaggattacctctccctatgatggcctatttaaaaaaatcctagtcacttaagaaatggggccaggtacaggaaaagggagctggaagacaaggcctagatcagaccagtctgaaggtgttggggttgtgagacccttgagaagggtttacaagcacatccctaagctcaagggcagcatggctgagataggagaagagacagacagacaatctgactcctcaaggtcctgcctgcctggtcatggacactgacgtcaccattaccaccaaaggccttcagttggagaattttccagttactctgggatagggtttgctaagcatcccctctggcccctgatctgaggcatccatggggtccccctgagaccaaacctgggagaaagagggactctgggaacatgcaaaggcggagaacagagatcccgcccaccccaatgctctacaggacggtggctccagctgcgtctggactccgagggtccttcacaccgatgatgaagttgttggttctccgactgccgtggacccaagataagacatctaccttctccacatggtgacccctggcttccaggaattcaatctcttcctcggtgaactcacctgaaaatcatccccatggcaacatgcacttagagtactgatttaggaacctcaccatcaggtttcactttaacagcaggaattttgtgaatttgcatcctcacggacaaaatggaggattgtggacaacctaccacataaagttgttgcagggactaaaggaaataatgcataaaaaggactgagcttggagtcttgcacacatccagggatccatgataagcaatcgttcttctgtttgtttgttttgggggttttgtttttttccagacagggtttctctattatgtagttctagctgtctgaaatttgctatgtagagtaggttggcctcaaactcacagagatccacctgcctctgccttctgagtgctgggactaaaggcgtgcgccaccactgcctagccttagcagtcattcttttattgtttgtttgtttttcaagacagggtttctctgtgtagctttgtctgtcctggaacttgatttgtagaccaggctggcctcaaactcacagagatcctcctgtctctgcttcccgagtgctgggactaaaggtgtgcatcgtcaccactgtctggcttcagcagtcattcttaataatggcaaaagacctgaactctatctccaagtgccaccactgcttatgagggttactgaacggccgacttaatgttcattcgttcgttcacccagtcttgccttctttacagctacacacactagccaaagctatccttctcccactcaaaaccctccaacagctctgataggtcttaaaataaaattcaatgtccacctctagggcccactgtcagctggaaccccagtccctctttaaaatcttctcctgagttccttctattctccaccttgcttaactctgttccagccatactagcacccttgctgtctcttaagtacaaggcctttgtacctgctactgcttcatcttggaatgcttaccctggagagtcacgaagctggctcctttacttcattcctgtccttggccaaaggcacctcttcaagaatttccctattatctagaatatcagtatctgccaggtttatcctgcttcctttccttccttccttccttccttccttccttccttccttccttccttccttccttccttcctccctccctccctccctccctccctccttccttccttctttcctccctcccgccctccctcccttccttctttccttttgaaataggtgtctcatgtagccctggctgacctcagactccctaggttcctactagttgagatgaccttgaacttctgatccttctgcctctacttctgagtgctgggattcagggcaagcaccacaaggtccagtttaatatggtgctggactagaacctagagcctcacgtactttgagcaagcactttaccaatggtgctacctccctagtcatatcatgctagtttgttttgtttgagacagtctcacggtgtatcctttgctggtttagaagttgctatatggaccaggctggccttgaactcacagagagctgcctgcttctatctctcatgtgctggaattaaaggtacacaccaccgcacctagcactccctgcttttccccaaaagtatttactactgtttcaactgattaactgtattttcttaatttcaagttttaaaaagcaggttggcttgtttgtgattgcttcctagtgcttagagaaggtcagcacattgtaaaaattaagtctatatttgcaagattgtagttgcttaacctctgggttgagttgaggttttcatcatctcctgccctgagccatatcccatgtttgtatctagacttatgttctctcttcaatccacctcccctacctaaagcaaatcaggccatacgtctgtctccagctgagtgcttcttaacatagacctcaacgaaagcctagtttatgtcacttcccttactcctttgcaaagatttggtcttcttatgttctcaaacagaatgattttaggtggttcttaagaaaaggcattattgttttatttatttgtttgtttattttttgagacagagtctctctattatatagctctggctgtcctggaactcactatgtaaatcaggctggcctcaaactcacagagaaccaccaacttctgcttcctgggtgctagcattaaaggcatgcaccaccatgtatggccactaaaaactccattttactgagtatcattaagttatcacatcagaaatctatttcctttgtggtttacttttcatccttttgattatggcaagtatcaagtttcaggctggtatctaacattttctgaactcttatacaatgagagtgatcctccaggccttctgtagacagaaccacctaacaataacctcaacatatttgacttttaagtaactattcatcgtctgtatgttgcaagtgatataattttcctgtttgtgatttaggtttatgttcaaactatacttagttttaaaatgaggggttgctggagagatgcttcagtggttaagagcactggccactcttcccaaggacccaggttcaatcccagcaccaacatggcagctcacaactgtctataattccaactccaggggatttgacaccctcatacagacaaaacacaaatgcacagaaaatataaataagtaagtcattaaaaaataagttcatctgtgagattatgttcagggtgatgtagcattaaaaaataagttcatctgtgagattatgttcagggtgatgtagcattaaaaaataagttcatctgtgagattatgttcagggtgatgtagcattaaaaaataagttcatctgtgagattatgttcagggtgatgtagcatttgcgaagtagcaaaggtactagctaggtaaactcagaagcctgggaaacagctggtcttactgatgttttcccacactgttctttctgggtttttcacagattgttcctcctgtccaaaaagccatttgtcacttcctgcccaattcccactcctaatccagtcagttaccacctcctctgtgaagcctcccagagctaccccctggtagatttctaactagtttataaccagttgtttataaccagtttctaaccagtctctaaccagttatttctaaccagtttataccctccatgagcttctctgtctgcaaaaaagtgatggtactgactaagcaagggctgcctccatcacttctggatcttcttggaacaagcagattgattgtaataactactcaaaaatgcaatgttttcctatttataaaactaaaccgtacccaaaattaagcttttgttgttaggggcaactctatctccttaccataaaccgctgaggttcatgatctggtccctgccctcctctttgatcttagcatatatccccattcaccttggtctcttttatttcttaaaaaacacgaagcccaattttgctctgagttctctgcacttgttcttagtctacaaagctctgccccagtttttggcatggtagggactttctcactcttcagatctcagcttagatgccaccaaagagaagccttccacgatccctgtaggtccaattatatcatcctgctctgactctgcgccaaacttttctcttgctagctcacatttctctgattgtttttctgtctgcctgtaaatccctgaagctgggatgatgcttggcacatacaaggtcttcatcatacaccactgaatggaggtttgcataaaacagctattatctcattttatgcaggagaaagtgaagtctcaagagttgaggcatggatttcctaatgtcacaaagtcaggaaatgccaagatggttccaggcttcagatcttacattagccctatagaatttgtcaggggacccccccccaaaaaaaataacttcacaaaaaggaagttagtgctggtcaaggcaggagaagctttgggatagcccttctccaccaatccctgtgcccatccttaggaatttgctctgcacttactgtccacctgcaggaggttggactgcaggtctgggtggaggcgtcctcgggccaggctgtcacttaggtttcggttcaatgttaggacattcagtagaacctgtgggaaaacagagcaaaaacatcagcttctctggggacaaaggttcaagacttcatagctctcatcctcagtccaaactctttagtctttaaaaagctcacacttgatgtgtcatctaactcttccaacagccctggaaacctatgataactgtccccattttacagaggaggaaattgagagccatgcaactcctttttagagttgaaagaagaggtactactagcattagtcttctataatctagccaagggcttccttttctctggagaaggcagggttaacagcgtgatttagtattcaatataggtagtttcagcttaatggttaggggttggaaagattctgaacttcctacccaatgctactagttaaatgagcttgagccaaattcttaaccagtctgagcttcagtttccttacctgtaaaatcaaaacagtcattcctcccagagttggtgaaattggtcaacacatacattacagtgcctagcacctagtaaggactctatgatgttagttgttgttacctctacttcacaggtgagggtactaaggttcagaagaggttacgtgattcccccagcatcacatagctgaacattggaagcatttgggttggaactcaggggaatctaattccagagttatagtgcatcacctgtcaaaattatgagcctggtgtgtgccagttgctcaaggcactcttggaactgtcttgaggtattctggggagtagcaggaccttcctttcaaaataagaccccacagagtggtctattaagataagagcaggggatgatgggacttgaggcttacagaacacaggcagtccagatgttaaattacttctgaattctacttgccctgcaatttccccgaaatctcatggagacagaggtctccagggccccattttcactttgaagcccaatcccagaacattgtccccaacacaggcctggtacaatgtaatacagcttgtgattgctgggaaaaagatggaaaacaacccagagataatgtggggcacctgcagacctggctcctgactacaaaatatttctaacagagtaaatctcacctgggtcaggccactgaggcctcgggcagctccgttggcccccagtgcaaggtaggtcccgcagagcccctctgctggtcggactacagtgggcagcaggaaggagaggggccgtttccctggctgtactgagttctcctgttgccagagggcagagatgaaaagggagatgtagcgtggagcaacacagggaaggaaccagttcaccaccattcatgcccactgcttttctcatatatggtccacaggttcagctcctgggagataggtcccttcctagcaacaatgtgctgtctgtgaaagaggaagtgttcctggaagactagagtggtaagagcaagagacttggaaccattgagctatggggcgggtatggatggaaggggaaagacggagtgtagaaaaatggtaatggggacagtaggattcccattggaccacctctgtgtctttgccctataggaagcttgccagagtagaagtgctggtctccaagtggacagatatgcctaagttcttcctcctggcccctctttggtgtccagtcacagatttgagcaccattagcccagcatatacctctagtgctagaaagagcccaagcactaaatggggatcaatggtctcattgcccagagaggaggcaagactttctctagtcacactaagctcatgacagaacggcacaaggattccttagacctaccagcctccatgctccacatttagcagggacagggatgaagttcttaaaggaaataggggggaagaaagacccatggtgctacctagcctcaaggtccctgggagagtagagaagagcctaccaggctgggtgcagagtggttagcagtcctgttgggccaggagaagtccaacatctggctgttgagtaggatcccagaaggagtgatgaggccactaccaaaaggccggttcagggagctgggtgggcagaagaaaggatgaatgggccctgtggctgccttccctgtcacccagcccacttccatcctgcttggaatgatttattgtcattggttctaagcctgagctgacatacctgaccatggccacaatgaagtcatcaggacccatgatcagcacctgggcagctgtgggagccccatccagctcatagacaggaaggagtggggcaggggctgcctgagagtcactgatgtggccccggaagttggcggcctccaccttgctgcaaagtgggtggtagatgaatgagcatacaacaacttttattacatcccacctgtctgtgatgtttgtgtgaatacttagttaagtctgccttctttaccggaatattaagtctacaatggtagatcacactgctaacacataggaaactcccagaaaataactatgaaactgaaccgatttatttaggtgttattcagagtctagagccagccttttattttacttattttctaatcaagagtcgcagttatttggctctattcctttctatgaaaatgtctggggtccagtggatgctctgagatatttgtttggaataaacaagcttgattgatttggtctaatgtttgtagtttggaactaaagttcattaagagtttagttagatggggcccatgagatagctcagtgggtaaaggtgctttctgtacaagcctggcaaccccagtttaatccccaggactcacactaaggtagatggggagaactgactccataaagttgtcttctaacctctccacacacacaagggcaaatatatggcccacatgcatacacataccacacgtcatcatcatcattaaataaataaaataaagttttaaaaaatgtttagttaagccaggtggtggtgatgcacacctttaatcccagcacttaggaggcagacaggtagatctctgtgagtttgaggccagcctggtctacaaagtgagtttcaggacagccagggctggtacacagagaaactctgtctagaaaaaccaaccaatagaaaaaccaaccaatcaaactaacaagcaaacgaaaaaacaaaaccaaaaaaaaacccaacccctgtttagttagggggctggagggatggctcagtagttaagagtaattcccagcacccacatggcagctcataactatttgtaactctagtttcaggggatccgacaccctcacatagatatacatgtaggccaaataccaatgcacataaaacttttaaaaaattaataaaggaaaataaaaagtttagttagaagccagaagtgttgatgaatgattgtaatcttagggggtagaagtgaaagatttttaagtgctaggtcagttttaagtcatttttaagaactagactgtgtagaattccaggccaggcttggctatatagcaagattctgtcccaagaggaggaggagaggatctttgttagtaggttttctgttttcaaggcaaagaaaacacagtaagccctctgctatttactagcagaaatagttgtatatgtttcatgtaaatgcaggcatgttttagagctgaagttttccatgcttaaagcccaactgaggagttctccattattactgctaataacttgtgtgttgggtgttttgtagtgattagggaatggtaagttagctaggactaccaaagacattcactcggttttcaatccaaaatgctgatgaccacacagagtgagctacagagctttgggagggtgggagaggcttagttttcacactttgtcctggatgctttgatgttcattagctttcattgctcttattttagccttgtttggataaatgatactaacttttgtttctgttttttttttttttttttttttttttttttttaacacaggatctttctttctagccctggcagacctggtactcactaggtagactaggttggccttaaattcagagatctgtctgcctctgtctccagaatactggagttaaaagtgtatgtcaccatacccagcacgatattaacttttgctatagtgtgtgcatgtgtgtgtgtgagggcacaaatctgccatgatgcacacatgacatgatgaacatgtggagatcagaaaacaatcacggacatccatctatccttgctgttcactttgagcgggcttttcccattatgtataccaggctggcttttgggaattctatccccacctcaagaggctactagaattacagacacccatgctggcctaacagtaggcctaatgtgtaggcctaacagaagcaggtttttatatgggttctggggattcaaattcaggtccccacatttgtgctgaaagttatttttcccactgagctatctcccctggctccatagttttaaactgacaggtacaattagatgtatttcctacaaaacagcttacatcgtagctcaggtcaacctatgacctagctcagtaacttactgtgtagatccagcagtatttatggcagttctcctgcctcatcatccagaatgctggaattatagacataagccaccagcatgatgttttggtcagatctcactagttaacaactgtgagagtccacagttatcatttttttgtagtgaaaatatcaaacactgtattcttcaaaatacaatacttgtcattaactatagtcaccatgctatgcaagcgacctcttgaacctattcctgctatttgcaactatgcatccctttctctgaaacctctggattcccatctttttgcttttttgtttgttttttgttttggttttttgagacaggatttctctgtggctttggaggttgtcctgaaactctctctgtagaccaggctggtctcaaactcacagagatccgcctgcctctgcctccccagaggcagggattcacgacatgtgccaccacctcctggcatctttttgcttttaaattataagttgctcacaatttaatacatagagtggtatttgagtaacagtataaatttatattaaccatatttttagcttctgattttcctggaccctgactgtaagtcaggtacagtagcagtcaaacaacccattcttacctctatggccaattaataataataaattgcatttattgcacatttactgttccagttaatgtgctaaatgctttacatgctattcttttatttatttacaagttattgtcatgaaaacctcgcagagtggatacaatattgccaggctccttgtggaaatagacttagtgagtttaaattactctcccagagtgacagctagcaaatgttaatgtgtaggcctaacagaagcagatgttaatgtgtaggtctaacagagacagtctgaccagagcctaatctcaccactgtgctgctggcaaaaatacaaccactcaaaagtcccatcaactccagcatttgcacggagactattttgttgctctcagactttccttttctacgcaaagtggagaacagctgtgtccatacagattaggtacatgcagaggtccaaaaggattcatagacagttgactaactcactgtgcagacagaggtgatgcagccagaggcacctagtgtcacactgagttagggttcagctgaaagggccttaagactttgctagttttttacctgatcccttctcccatatctaccccgatttctgcagcacccagggtcatgtcccgggacaaacctgagcatgtcatccatgctctcagtgatggtagaatcgtaggcaggatctcccagtctgctagccagggccaatgcaatcttcaggctctgaaaacatagcagggaggtggaaaaggctgccaggcccctcccagcacccccacttgggagatcctcatgtgcaagaaaactcaaaggtgttttagccctagtccaaggaggtactccattttcccattccttttgttcccaaatccaggtaaggtggaacagtgtgggccttacctctgccacccagtgaagcgcctgctcacgggacaccaggctggtcatgttgaagccctctaggatgttgagagcactgatgagggcagggcctgtgtgtgggggtgggggactgagaaccaggtggcctgaaaggataggaaaggaccagatggcaggagaggggtcaagtcatcttcatatatcacatcttatgtgcacatcccaccattacacacacagcgatagacctgatcaggcgaggaaaggaaactactaagtggcaaggggacccattgaagttcattcacatgctggctagaggtggggctgagcttgaaatgaggtactgggctttggcttcctctgccatagcaggaaactaaaacttaagagctgtgttgtactcacgttggcagcaaacatactaaatctgtcttgctcagagtcacattacagctcactgacaaagcagggacgggtgagcaatgtctacagaatcctagtttgccatgaacttccttcaatccctcccacagctcaggaactgttcaagggccctgatggtttctctcaacctgaaacgtcttgggagcagcagccttccctccctactctgtttttcagtggttggacattaaaagaataaccacaacactggcggcatggaacactgacagtaactacctgactcatggaatcaggggcagaaactgaggcttaagaagcaactgggccaggaatagagaccaggtgaacctacagcactcaaggccctggactgctgagacaacccagcctggggaagaaaaacagagaaccccatgtgtactcagcgtccactgtggtcaaggcaacttcctatagtatttcatcaggtcctcataggcaccctgagatgcagacaccattattgtctccattgtaaggagggaaccaagactcagagtgggaagttcagggcaaatggtacagctgatgcccatctaggccctcctgactccacagctatattctttcctcttcatcatatactactaactctggttgaggaataaggaagacaggagcctggaaatgtgaactcggaggaagcctcacctggggcttggggtaacctgtcctttctagagaggagagaacctaagaactctagagggacctagaacctaacatcttggggtcaacaaatataaactgcattcatgacacaggcttgactttctaaatttctgattggtttcttgagtcaggtgggttgttccattctctctttaggcctcagttgtcttttcctgtcaatgagggacaagtctgttgttatctttaagggtttaatgtgcccttagatggactttggtctgacaaattcttaggaaacacaggacaatgagaagcgagctagggacagagttgaggcaatacagaacccaaaccaagaaaacctaagcatccaggatgtaactcagtaatggggaatttgtcctctgtgaaaggcccaattcccaacactaaaaaaagcatataagtaacaaatccccacaaaacaaaaggaaaagtcatgttcagaaccccaaacttccaggtcttagccattggctagatgccccccaccgcctcctaatcacttagggtaactgaccccatagttatttcagaaggcggctggctctggcttgtttcaacagttggctgcctagggagttcactgcccccgtttatcccctgtgacacggagaggagtttccaggccaaagagatgtggccatggactggaaagcttctcctgagtggggacccttgggagctgggggagaggtcacctcggtacatgccacacacaggcttctccatgagggcgctatagttgctaaagtcctcttcagttatgacaccccctgcatgctgagcctggaggggagaaaatgtccgtccatcactgtgagcatgtgggcatggcccatgatacatgtctcagtcacagacagataaactgtttacaacttcagtcccttccgtagccaccagcatgtcttttagggatcccatcagcccaaggaaaaaggaggcagaggaaataacaagtgtgtcagaattatcaaaactgaatttgacgtttcactgtaaccaattaaatatactccagagttgggggtatagctcagtggtagagtgcttgtttagtatgttcaaggccctaggttgagacttagcatggccccccctctaaacagtaaggctgctacaaaacttcgaactttgaacgatcctgggaggactgaccctattgaacataattgagcattatttcctgacaaatgcacccatcttgtacaaatcaatgttctcattccactctagcagcatgtgcattgtcaatctcttaaaaacaatttaaaattattttatgtgtttaactgttttgtctgcatggttgtctgtgcaccacatgcatgcagtgcccatggaggccagaagagggcatcagattccgcctggaatcggagttacaggtggttgcaagctcctgcggatgttgagaccgcaaacctggatctctagaagagcggccagtgttcttaaccactgagccatttctccggccccacatcaattttaaattagtattaccattatcaatcttttttcactttctagtatgtaaaacttttgacttatctgcccttagtgaactactcactgtatttcttggctaatacatagtcatgtttctggcagattaataaaacacagtgcctggtacagagaatgtactccatgactgagtgacacacctatgttatccccacagtatataacagaggcttagataagtgccccaatacatagtacactcaatccgcctgtgcaccgtgttcttgaacttttctttgacaatgttctcagaatctatgattaccctagactaagcctctttggagttgggggtatcctcctatgtcaagttcctcagacccatagttcccagggaaaaaaatattaccatcagttcttggaaaatcccagacagagcagggaagattttgggcccagggcaactgagactaatactgtgtttccatcaggcctgggaagaaataggccagactcctgtacagctgtcaccagccctgagaagcccagcttccctctcaagacagagcatctctgtcccatgtttttcatatcacatagtaggtgatgctttttgcccttaatgactgaccactggtctcatttctatctccagaggtcaattttgtttatgagaaacacacagccagaaactatgtagcagataaaaggggaaggacagcatccctgccatagggccacagggcatactccactgtcacactcacctcggccaccatctccagtgtgaggttgccaccattgtagaaggcagcagggccagagacgccaagtatatccagtacctcagctagatcaggtcgtcgcagcagggcaccaggcaaaggtgggtggcccgatggcaggaaagtctccaggaagcgttcagacgcgttgggaggtagctgctcagccaaggcatgggctggggggaggttgagaggctgggtgggcaaggccaagactggactcgatggctgagatgtataataggtggggtggatgagggctaagtgactggccctgagagctctggctccccagaagcctgtcatagtggggcagggatacacgtaggctcttcccagaccctctcactggaggctgtctccaggtgagatggaaagaagtctgaggagcaaactggaaaaaagaacccctttgtttggggcccaagtctcaaaggcctccccattaaccttataccttcccccctacctccaggccccactgacctagatcatgggtcacgttgaagccatcttgggccacagctgctcagaaggccaggacttgggaccagggcagcctgagggggccggagagcagggggtggaggaggtcctgggggaaggaggaggggtcctggggggaggggggttcctgggaaggagaaccctggcaagggaaggggatattaggaaggggagttgggaagggaagactccaggagaacaggagaaggccacccaaggagggatgtaggcagaggcccctggtccccaggggagggtctttacctgccatagagctggtgagcttcatgtagccctttcaccattccaggaacccccaccaagagcccaggctgggcgaggcgggcaggcgagggagagaggagaccaggtcactggaaggggggggctgggctgaactccgcagagccccaagccaggaatggctggcacaggggagagacataggccaagtatcccaggagaaggtcaaactttccccagaggggacctctccctcatccctaacttcttatatgcaaatgtagaatggtctttgtctcccacatttgagtgatttaataaattcagcaaaccattttaagaggcaggacacaaacaatctgggtaaaattctgttcatgctgggtaatgggtacccttgtctttttaaatggttaacaaaggacctcagtttagccaatccatcgtcatgccaccgtcagtcatctgagttgtgataactcaggggtgtgtttgatttttgtcatggcactaaacacctactttctcaagttactctgcttcttcctttgctctcaataatagtgaatttgcctctagcatttttttctcccaatgtgacacagcctgggaaagtcatagtcatcaggcttagagagagatagacagagggttttttgtttgtttgttgctgttttgtttgttttcatgtttgtttgtttgtttgtttgttttttagacagtttctctgtgtagccctggctgtccttgaactcactctgcaaaccagactggctttgaactcagatatctgccggcctctgcctcccaagtgctgggaccaaacgcatgccaccaccaccaggctgagataggtgagtttagggcaacaactgagtgacatttcagtattcaaaggtggctttatactttcttccagacaggtaaaactgccagagaagtaagatgttattgcagtgctatctgttattaatcatccaattttcttatccattttattttgatttttaaattatatttaattaattagtgtgtgtgtgtgtgtaggtgcatataccatggtatgtgtgtgaagattctgggacaatttgtaggaataggccctctccttttactttgtgggtcctggagatcaaatttaggttgtcaggcttagtgacaaatgccattaccaactgagccgtctcaattggtccttgttcgttattttagatggggggagggcaagcagcctgtcgttatatagcttaagagcattttgcttgactcattttgccatagtaaatatgcagcaaaccaatgctcaggttagcaaaaggcaatgtagggagtccctcctgccccccnnnnnnnnnnnnnnnnnnnnnnnnnnnnnnnnnnnnnnnnnnnnnnnnnnnnnnnnnnnnnnnnnnnnnnnnnnnnnnnnnnnnnnnnnnnnnnnnnnnnnnnnnnnnnnnnnnnnnnnnnnnnnnnnnnnnnnnnnnnnnnnnnnnnnnnnnnnnnnnnnnnnnnnnnnnnnnnnnnnnnnnnngggtgtcccccgcccccccccccctgggccctctcctctcaccagggtcctcaccttggtatcccaggacctctgcagggcctcttccctgagagcccctggtgcggactcccggaaatcaatcaggtggctctcatttcgtcggatatcatgtaccagcatcacacccccgctgggaaagacacagaaagtggaaagcaaagagaacatgtcaaccttctgaaagattaaactaccactcccttaatcccctgcggtgaggttgtgggctgtctgccacattgggtcagatgttggagccccctccccagcaggaattcagacactcagccatcctacaaagggtaaaatcaagggagtaggggacccaggacactggagactttaatccctgattaagaaaaatgcagagactgggggaacaagctgttctgtccccaccctggaccagagctggacccctgccagtttcctgcacctgccttcttggtgtcccctcccttttccctcagaactggattatgtaaggataaaccgttcgaagccaaaaggggaatgctgttggtagagtcagaggattggtcctacgaagagaatgatatttgtcagcttgttccttttccctggcatatttacatccgagatgggggtggcacagttaaatatgtgcagccaagtaacaaaataaggacggcagggcagataagtggctgcaacaacagcaaaggagccagcaccctgacccaccatgggaagctctctctctgctcagctccacacgggcttcctgcacccaaatatcctgattgttccggagaggttagcaatctgaatttttatgaaaactattgatgttttaacaacagcaaacattaaaatgagcaaaccaaaccaatctaggtgctgggtctggcttttgagtgtccaatttgtagccttggttttaagaactccaagcctggggtgtattttctgtggacaaagtccacagctttcatcggagtcacagggatttgtgaacctaaagctggaacatcactgctttaatcgatgtcccccccccccttgctctctgtacacctcattttatacatcacaatatttctctcctggtggaaaaccgtgaaaactgaatacgcccccatctcttccatatggtactactattctgaattcatccagggagaaaaagagttgaaactgggtattgaacaagaaaattcgaggagtatggggctaccttaagctcaaaaccaagaaaaacctgcagccaggcccatggaccaggagacaagaagtaggcctgagggacccaggcctccaccgggtccttacccagctccttacccgcccaggccagaactgtgtggagccacgatccccaaacacaaggctgctgccacagctgcatccacggaagagccttgtttactgagcacctccatgcccagtgctgtgcaacgggaggcatccgtcaccacagcaccctgctggaagatctaggaggcaagagaagagtgggctagtagggctgtccaccaccctccagtacctccatttacctacaacctcggccttcatgtcttcttgattctcgcggccatttcctttgggaaccttcctctctcacgtcacctcttcccttcccatttcctagcaggctcccaccacctaaccatccaattcccatcacccccttctcccaagttcccttctgcccacctgctcccctcacctggggatccccgaagtagatctgcatgaccagcgccacggtgacacccgtggcaaaagtgaggcaggcggtgacgatgaccgtgagcccgtcctggcggcaggagcactcggctgctgcagctgagaatgggtccttgcgtgtctcccgtagtggtgacccgtcctggctgcccatctcggatgaggacgaaggcagccgctgtagccgggcggacttcaggaaggagtccgggtctgtgggttgtctgggtgtcagtctggcagcctcctacctggccctgcagtcctcagggcggggcattccatatggcccccctcggcccgcccattacacaaaccccactgccctgcagtgctcagttttcctccactccaacacacctaaccacccgcccctcgcgggaagccaatccccaggtgggaaaagacctcaaaatggccagttgaaaggtgggattcctgcttctggcaaatagccatgagactggtacccggggataagaatatccagaagtgtgagggttttcagcctcccctggaaactttatcctgtcctagtcgtatatcaaagcctccaggacaggaaggcaactaaccaagccaactacttagcttccagccttgctccacgcacccattcatttgatagatacaagcacctactgtgtgtctggccctacactagagcagataattgcagacattttcaagccaagaagaagaaaagaaaacaagtaaacaagttgtgggggagattatataaagcttgtggggctggggagttggctcaaagtaagagcactgcaagagagctcagtggtaagatctctgcaagcgtgaggacccgaattcaacgcctcagctcccacataaaaagcccctgataccattgtggaacagagacaggctgatcctgagccccagctccacagtcaatctacccgaaaaggccagcttccggttcagtgagggactgtctcaaggcggtaaggccaaggcagtaagggataccatccaaggttctactctggcctctgcacatgatcccatgaatcagtgcgtgagtgtgcatgttctccccaccccctttctctctctctctctctctctctctctctctctctctctctctgtgtgtgtgtgtgagatgcttaccagggaaatcagggaagtgctgcctgaggaaatgacttttgaacagagaatgaagggataagagaagctgccactagtagaagagaacaaggagtttgtttgctatagaatgttctaggaagagagagcagcaggttccaaggccctaatgtaggagtgactttgcatttgaaagaaataaccgaggtctggtggctctggtgtggcagcagacagggggagggggggtgccaatcagggtggaggctagtcctgtatactggccctatggacactgagaacttggacctgacctgtggtgagaggccactagagagttgtaagactggtaagtcacctggggtggtatgaatgagaatggcccacaggctcatatgtttgaatgcttagtcatcagggaatggccctatttgaagggattagcaggtgtggccttattggaagggtgtcactgagggtgggttttgaggtttcaatgacccatgacaagcccagaggctctctcttcctgctgcctgcagatccggacgtagcactctcagctacttctccagcaccacatctgcctgtgtgctgccatgcttcctgccaggatggtaatggactaaccctctcaaactgtgagcaagccccgattaaatgctttcttttataagagctgccatgatccaagcagatctctgcaattttgaaggccagtctggtctgcaaaatgagttccaggacagccagagctgttacacagagaaaccctggctcaggggaaaaaaaaaaaaaaaaaaaaaaaaaaaaaaaaaaaaaaaaaaaaaaaagagtgccatggtcatggagtctcttcacagcaatagaacactgactacactgactaagatgccatctgttttgtgttttcaaatgatccctctggctgctgtgtgaagaacagactggagggaataagaaaggaggtaagggaaagttgaaagccacttatggacaagtcacttcaagtcatgagccccaccttcttcattctagtgcagcacatccctaacagatgggccaggcacaggagtccatgcagtgatatatgaagaaagtcatttccttttctacccatgtaaagttctgggtagggtcaagcacacctgaaagtccagcatcgtgagacagagccaggaggtcacagctagctccccaggcaggctagccggaaaggccagctgctggttcagtgctaaactgtcttaagggataaggtagagagcgacagagaaagggctggggtcttactctggcctccacatgcacgtgcagtgatgcaaacacctcctcttatcccatggtcctctccactaggtgccattacccttgaacccataccccaatgtccagaaagttctagacatttttgaacaaggagagaggatgactttaacaccttattgctgtactcacaataagtgctttgtaagtttaaatgtttgagtgatgacattaaaatttgactgtcatatttttcatgtttacttgataaaaacccaaggtctttgacttggtgtttaagaaccttcatgactcacacctctatcttctatttaaataagaaatcaaatacatagataaaataatatgtgcagaattattagaatgcatttatgatgggcactttcaggaaaagacacttacattcttatttactttgtgtgtgtgtgtgtgtgtgtgtgtgtgtgtgtttgtgtgtgtgtgtgtgtatgtgtgtgtgtgtgtgtttgtgagacaggcagccctagctgacttggaactttttaagtagcctaggctggcttccaacttgaggcaatttgcctgtctttgcttcctgagtactgtgagtacaggtgtgagccaccatgtctgacttatattcctaaaaaaaaaaagtttatgattttattgttattgttatggttattgttagtgtgcatgaaagagagagtcacacagagagacagagaattagaggcagacatagacagaggacagagaggagtgtgtataccacagcaggtacgacggtcagagtacaacttttctgggtttacatctctcctttcaccttgctgaggcagagcctctcttcttgttacttctgcttttcacaccctaagctagaaggcaggcaagcttccagacaattctcctgtctcttcctcctatcttacagaaggagttttgggactagatatgcaaaccaccacatctggctcttctgggtttggtggatcaaattcaagtcatcaggcttgcatggcaaatgcctctaaccactgaaccacaccaccagccctattcctttttatttttatctttctgtgtgcatgcacatgtgtaagagtatgtgtgagaatgaacatgcatgcaagtgtgtggggaagccagaggacaatctcagaaacattcacatcaccaatgatgtctcattggtctagagctttccaattaggcaagtctggctgtctatcaaacctagggacccttctgtatctgcctcctagcactgggcttatacatgcatgtcatcatgtctcgctttaaacaaaaaagattttattattacatttattttattacatttaggaggcagtggtagcacatgcctttaagcactcaggagacagaggtacacggatcactgtgagttcaaggccagtctagtctacagagtgagttccaggacagtcagtgctacacaaagaaatcctatcttgaaaaaacaaacaaaaatattttgttacatcttttacttatttatatagtcattgtgaatgcatgtgtgagagtgtaagtgtgcacacatgcccacatgtgtagatcaacttgtaggagttggttatcttcttccaccacatggatcctggtattgaactcgtgatgtcaagcttggcatcaagtccctttacttactgagccttctcattgacaccataccctgattttttatgtgggttctgattgagcaatctcttcagcatttatactcctttaaaatttaagcacatatattttgtaataaaaagtaaaaatttcacagagataagaactgggaggtaggccaggcagtggtagcgcacacctttaatcccagcactttggagacagaggcaggaggatctctgtgagctcgaggccagcctggtctacagagggagttctgggacagccatggctgttatacaaagaagccctgtctcaaaaaatccaagaaagagagggggaatggggaagggagggagggagggagggagaaagagaacaggagggtagcgggtgtagtagtgcacacctttagtcctagcactcaggaagcagaggcaggtgatctgtgagttggaggctaacctggtctatatactgagttccaggacagccagagcttcttaatagaaagaccctgtctccaaaaacaacaaaaggaattggagggtaggactagataactggctctgtagctaagagtttgtgctgtttttgctaagaactggagttcagttcccatcacctatgctaggtgattcataactgcctgtaactccaattccaggggatcagacacctctggcttctgtgggcactgtacccacatacagatacccacacatacacataattaaagataaaaataaaatcatttttttaaaaagaataggccaggcttagtggcacacacctttaaccacagcacttgggaggcagaggcaggtgaatctctgtgagtttgaggccagcctggtttacagagcaagttctaggatagccagggttacacagagaaaccctgtattgaaaaaaaaaaaaaaaaggaatagagaaagggactctttcccccctcactattttattttgttttttttttacaatcagcaaataatttttaatttgattttaactcctttgcttttaaattattttattgtaattttatgttttgtcttcttgtgtatctgtgtaccatatgtgtgcctgatgccctgtttttagcttattttttttttttttttaaaaaaaagcctgtcaggctgaagaggtggcccaatggttaaaagcactgactgctcttccagagggcctgggtttgattcccagcacccacatggagactcacaagagtctgtgactccagttccaggagatccaatgccctcttctggcctcctcaggtacttcatgcatgtggtgcacagataggcagcaaaacacctctgtacataaaataataaaatacttaaaaacaatttatcttcctggggggtctccctgagttaatcatgcttgcatataaaccacaccattatcaccagcagtctgtaaatcagattccataaccaaacagttgttaaatatcttctgtggatacaaagccctcctagccccagagaaatattagaagggcaagaaggggctttgaacttttatttatctatcgtatgaggtgtgtgtgtgtgtgtgtgtgtgtgtgtgtgtgtgtgtgtgttgcatgtgtatctgatgtgtgtgcacatatatacatgttcttgtatgtaacttcaggcacttgagtgtgtgtgtaagttagagaacagtcttggccattgttcctagtcttccatcttgcttaagacagagtctcttgtttgcagccatgtacacaggctagctggcccatgtgtttccaggttcctgctccatctcccatctcactgtagaagcactggaattaccaatgtgccctgtcatgcttagttttttagatgggttctggagatctgaactaaggtccacacacttgggcagcaagggctttacccactgagccaattctgatgatacactactttttggtttttttgggggagggttgcatatatttccttattaaagtatttttatgacttcacaagctaggctccactatgctcactttacagatgaagaaaccaaggctaagtgggaccacctgtctaaggccataactcaaataagtaggagaatggaaattgtatcactggatagtctcctttctattgctctatgtggcacttgcagctattttcaatacccaaaaccaacctaaggacttaggtgagtgtggtggcacacatctgtgatccccacacttggaaagtagaggcagaaagatccaggagatcaaaacttgcttgggatacatcttatcccaaggtcttatctttaaaaatgcaaataagcaaaaatccaaccttctccaaagagataaaatgacttaagatgaagataatatggcttcaccacaactagacctatttaaaattatccaaccagcatatcaagttactcatttattcagtaaaattatatactgaggaaaaatatcaaaaatgggggggggagtttcttgagtacatgctacctgccctgtgtacatgacagggcaataatcccactaataaaagcaagagtgacatactgggaaaagattggtttggggccaagagataaaagtttattagagacaggcactgtggttcaaacttgcaataccagcacacaggaggctgcagcactcagggttgccacagtttagggctagtgtggattacaatagtaactcccaggacagcctcagctacatagtgagttccaatccaacctgagctacagagtaagaactcagactcaaagcaaacaaataaaaccccaagcaaacaaaaccaaaccaaaacaaccaattaaacaaacactaacccagtatgttctaggagaaaggtgagtttaattttgattatcctgaatttgtgaggcacaaggaattgctgtctgaaggtagctggtcaaaatatttaatgttctttctcctccatattaaaaaaaaacaggttataatataacctaggttggacttgaattccctaggtagcctagcctggccctgaactctcttaagggaagatttctgaacttgggagtgacatgactggaagcgcagagtggcgagtgtatttggggtgagtgcatcagagtgaagaagagctagggacttaggggtcacacaggtacaacaggttagtagctggtctagagtggtgatgccagggtggaccttcttaggagggagggacatagaaaaccaggtcacattttgaaagtgagaagagaagagggaaagatttgaaagtggcttccaggcccctactttggacacttactgaaaggcagtgtcacacactgagaatggccctggacaaaaaggaagagtggtgaagacatgccgattttggcatagaatgttggcatgtagaggctgatgcctaggagaaggctaacatggcttccatttggaagaaagggaacgaaggcattccctaaccttgaagaggtcaccatccagttctctgttctctgcgtcctgcttgggaagtctggcacttgattttggagagtgccaggcaacaggctagccaggcacatcaaaggtcttggctaagaagatgggacagtgccactaggtggcactactaggttgagaatatagaaggtcatattagccaacaaactggtctagctggaccaaaagactcttgggacttggaaacaggcctaagtgacacggcatctaaatgcttatattgttgtgatggcaaggcactccaaggcaaggtcctgggaactttggtgtatacccttgtgataaggtataagttcccaggagctcaattaaccagggtctacgctgaatttctaggcaagtgttctgccactgagttaaactcccagcccctctcggttgaattgccttgcacatcaggacacagcctacactgaactcccataaagcatttttgaggtttgggaactccattccctgtgattatttcatcctgaaatctctttcatctattcattcaaaaattatttattgagtacccaatgcttggctgaatgctggcaacaggatgaatttttaaaaaggccatgattcctgcccttagaggcctcttaggtatgcagtaatcacatcacttcccaaataaataaccttaggtttttataaagcaatgcctttaacaaggaatcaggagacagattaaatggtccaatctgttatttagggcatatgggcattcttttttggaagagaaaactaaggaacagtacagggtaggcacacctactttaatataatgagtcaggactgcactactcaatctctgaatagaaaacctgggttgaccagatggctggttccaccaccacatattttcccacattcttccttctaccactaaggctaatcccccaagaaaattagttttgatgagcagctgtgacatttgaggattcaaagtctccataccccatcataggtaaagagtgatccagtcaggttggtaggacctgctagtcagaaccatatgaccaaaaagttagagagaactgccagttgcccagccaggagtaacaatggaagagtcagactggaaagagctgggccagagaagcagcttccttcagtacagaaagggatatcgctcaagtgcaggcaccggaggaagacagagagggaggcagaaagatgctctaatgccaggaagtgacgttgaggcaaagaggtcagagggatgcaggataaaaaacggaggagagtatagcgctgggccacatggataggagaaatagcgctagggaagggatgttaagacttggcccccagctctctcccaagtcctgcttcctccccccccacacccccatctccttcagtttctgcagaggttgagaacacagtaaaatgcggagactgcttcctggggaacaaatcttgccactgaccagaagctcctaccaacccggcaaacatccgtgccagacccacatctctggaaagggtagagtaacccacagaacatcaaaggcactgagtccccaaggactttgagaggtcatgcagaccatccccttgtctcccaatacccggaattctcagatagaagggaatcatattttctttactcatctctggacatgaagagatagattctcagctcttctccggactctctgcttcccataatccctgactgtgatgaagttctccttaagatctagactatatccctcctgctgcagcctctgacttggtttcttctatcctatcctctgtaactaaagagaagcctttcctaggtgatcacagccgttcttaaggctctcccttccagcattccttccttctcaataggttcttccgaatcataatccctcctactgcagtcattgcatcctttcccgtgtcgcatcctacgcctctaaggcaaaaataccctttcccccaccacacagttatcagagctgagggagaagggaagaggtccaagatgaaaggatgaatgaaggagatgggagactgtaagtgtatgatgcccagaacagatgaaggaggaccaggaccccccaaggcgggggagggatggggacagagggcctcaccggtatccgggtctcccaggaaggcgtcctcgtccttgcggcccctcagcggggccgcaggcgctggctcgtcctcgggcagccgcgggaagctggtgatgctcatgtagtccactggcgagtaggcgcctagggcactctcctggctagcctcgttctctgccgccatcctcgccctaacccccagcagcgcagcgcctgccggaagtggcagtggaggggggtgcgagggcggagggcggggtctgagctcctggacagccgggagggggcgcccccaccctcagcagtgtcctggtctgactcgcccccgcctgtttaaagtctactgttagcagcctgcacactggtgcaggagaatggaagcccggagggcagcggaaggttgccagcaagaggacgctactctgggctcatccctggtccttgctccttccagtctgaatcctgctcagatcccatacactcctaggaccagagactgacttctgatcacaaactccactttgactccagaccttttttttttttcctgagccactctcttctcgggcccaaatctctctgtgggcaccaagattctcctcctccgatctcagactacccctcggacccatctgagactacttaccccagacttacaactctgacttcacttcaccccagattcctttaagtctccaaccctacttcatccagactgtttttttcatctgcagacctctcttgagcctcccttcaatctcacatccttttctgcaccctaaaacttctcttttaaaccccagatccttctggaatcgccctgatgtgtcagcaagggagagtaccccttactgaagcccaccccaactttaggatcctcagaagcaaaccctcagattccactccagggaactaattcagtaggccagaacacgatctttggaaccttaatattcgtctgcatttttcagaattcttgatgtggctctggaactaaggtaaaagaagtcatgacgctgtgatagaaacaggagcagggtgggatgggaaggataaacgtgtaagaacaggggcttaagaagtagcgctttgatagaacgcttgcctgtgtgaaggtttgacctccagcatcctgaggaggggggcgggggcgaagaaaggaaatgtaagaatgagaacgcatccctgcacgctaggtgcctgccaagcccatctctggaattgctaccctagctccaagaatgaaggttttaagcccaaactcctgtagttcagcccacaggcagagatacagggctggtgaagccgtggatacacactgtctctcgctttcccaatccctggctccaggctcaatgtgacttgaactgttttagcatttactctggacacaaggagctgcagtgccacacgtatacagcaggaggcagcagtagatagcgaacatttgcgggagaaaggcttaggaaggaaggcgggtcagagctgtgcagtgaaggtgggagtaagggatgatgacggttttcatacctactggcaaaattgcatgtgccttcttccccacggagaggttttcatcttattagtgaggtctgtagggaccatagtttccgtgacctcatacccctaccagtgagttttgttcccactaaatgagatctgtgtcacctgagtgttgtccactcctccagtgtatgcgaatgctcctccgtgggagttgagtcctctcatcggggttagtaaagtctgcatctcatagagggaaatctatttcctagtcagttaatgccatcctgtcctataagcagaggcagagctcttccataggatctgagacctccagaaaattctgtacctcctaatacagttcatgcaacttcagagagtgtgtatctactcagcggagtgtatgtctccttgacgaagtatctgctccctctctgagatctatgtttattctacaaggtctgtatgtgcttagtgggctccaagatcctcacctcaggatcagttaggctctgggtcatatatctgaacatgaggaaattcttttttcagcttacggtgtgctaagcttatggtcagttggacaaagatcggggcagctggtgggtagatgggtccataagccccaagtagggatcaaaaggcaagagagctgcctgcttcagacctcagactcactcttgtagttagatatttaaagatcctttttctatggccagtctgtgaattgttaggtgatccggctccttcttggtgataactgtgggcaggagatagagggtgtcctactaggcttccctctgggttaagaggatgggggggcagggtgaggtaaactccatttgtggcagatggagtatacataggtgaattaaagagtgcaaatgattgctctttatatttttattattttgttttgcacagaccttggtactttacaagatctagcttctgtttgctccttagctttgtgaaatttcattttctcccttccccctttcttccttccttcttccttccgtccttccttctttccttcctccctctctctttttttgtggttttttagatagggtttctctgtgtagcccaggctgtcctggaactcactctgtagaccaggctggcctcgaattcagagatccctcctgcctctgcctcaggcgtgcaccaccatgcacagttcctttcctgaatttaccttttgtgcaaagagaacttgtgctttttggcaaaggtctggaggatcctcgcggtcttcgcttagagtcttgtactttggatcagggtggagattaatgcaggcaaagaaaatggcaacatgcccttagaggtgggaatcagaaggccgcgagttggcaggaaggatcatatcatacccgggagctgtgccctcaaggtcgcggaggaattttttcatgagactggaagaggggtgttgcttggcgggagacttagaggagtgtcaccagaaggaactgtactccacctggctatccaactcggtggagtgacaggattgtgcaatcagaccacggtgtgtgcacagcggatgacccaacgcttctcattagtcagccatttcagtctcgagctgcgcggcgccatcacccaacccccatctgtcactccaagaccctaacttggtcactccacagccctgcctcctctcctgtcacttccaacccggctacaccccatcactccacgacccgcctcctcgcctgtcacttctggccccgcccctgctctgtcattccaaagctccacccctctcctgtcattcttagaccattccttcgactttcactctacggctacaccccttccggcaagtcagctccgcccctaccccgacttcgcctcagcggtttctgatgaccccgccccctcgcccacggccctacccactattgggtgtttaaagcacggcctccagcctcaggctccgccctcgcccgaggccccgcctctagggccgacctgttttccacgccccggcacccgcagcaaccgcaagagccgcacggtgctcagaacttgacgggatggggcttcccgaggagcagcgcaaaagcgacagcgggagccgggctcgggaggagaccggctccgagggccgggtgcggggttggtccccgccgccggaggtcagacgctcggcacacgtctcctcgctgcagcgctaccgcgagctgcaccggcattctgtggaggagccagggggtgaggctgggcccgggagactcttgggggcgccagagagcagaagagcgggactccgaggggcattcaccgcgctcccttagggaggagatggaaaagggattcgaaagagacgacgttccatgagaagaaggaggggtctgtgaagtgaaggttcctagaagttgggggactctctggcgatttggtagttttgtgagatgtgtgctttcacaaggagatgcgggttctgtgaggaaaagcggggttcagtgaacagaagcggggttcggtgtgcgaagaacccttggggagactggaaaagggatttccgcgaagactaagtcgcatatgagagagagagggagagagggagagagagagagagagagagagagagtctctgaggtaaaagaaaagctccaaggagcaagtgtgcgagacttgaggaaaggagaacccagaagagacagaaccttctttgcctccaattcaacaattgcctccctcgctttgctcagcggcagttccaagcctggttcccatcttggggtcctgcatctatttaatatagtagcaatcccaatatacgattgaacaagttgttaatatgtcaagttttttgttttttttttttaaatttggccctaagttgcagtgactcagattctaagagataattctatgcctttaaaaacgtgcccgggcagtttagggggcaaaaccatgtccttgccaggcctggtggcacacacctttaattgcaatcactggggaggaagaggcaggtctttgtaaattcaaggccggccttgtgtgcatgggtagttccagaacaaccagtgctacatggcaagaccctgccaaaaaaagaaacaaccataaaaccccactaccatatcccggttgggaggcagcatatttagtggtaggatacacaagccacgaaccacactcagaaaaatgcataaaaacctttttttatagtcttaggcagatttaaaaacctacctaaaatgtactcatctccaagataggaataatagtactagcttcatagattatgaagactaaagtgggtaataaaggatccattatcaaaggtttgatgcccaagcagtcattaaataagtaacgatttgtttagcaacaacaaatcccaagcagatcccaagcaacgaaaaatagtactgaatcaagtgtgaagttgttccttgctacaagtagtgtccaagtttgattcctcgggtgtcttttccttctctttctgtattttctcccatcaggagttacatctggggtaagtttgtaccatagcaattcatattctatgtatctggcctcctaccttgtatttcacttatatttggtccccaaatttcataggactatagaccatttgtatttcacataccctgaacaaaacaagactgtgagtgaggtttcccagttttctctcccaaacttgctttcttccataattatttttttctttctttctcttttgccccaattttctattttctgctcgtgtcaatggcactaccccaactataaacctcttccatcattgtcttctcagatatctttcctacaccttacaaatttatagatacttattgtttactaagcagtatttcagtttgatttgatctgagtaccacccacattttatagaggaagaaacaggagcttagagactaactcacttaaacaaggtcataaagcaaatcattgacggagttgggctttaaaacaacatgatcttgactagagaacttgtactctgaatattatgctattcttctctaactctgcagtttgcttttcaccaaattctgtcaaatactactttaaaatatctctcagactgacccttcctttcatttccacagacacttaaagtcagaacaacaggaagcagtttcctaatttgtcccctcctccctagtcttaacacctgcagttgctccagcagacttatctaaacaccattaggctgatattcttggaatatgctttcatatgcctttgttaaaaaaaaaatctttctgttttctccgccccccctcctctgtgacaggctcttgttatatattcttggctggcctgcaactcaccatgtggatatggacaaggcttgcctcaaacttgtgatcctccagcttctgccttctgagtgctgcagttatatgcaggtgctaaatgcctaccttttaaaaatgttccccctaaattaagattctgcttttcttcaggagcctttgggtaacctagcttcacctcttcaatcttctctctactattctctattatattcttcattctagatagatctacttcatatcctggatacctaaaagtccctttccttgtttggttttgcccaaccaaacctaaaccccacctgagcctcagttttctcacttataacattaggaatatatgtatgtatatatttcataagcttatgccataaagattatattaagttagttcagtcctaattagtcccatctttcatctttacagctttgtatatttactaaatatcagtttccatttgatttttgaaaaaaatggccattcagtatttttttatattactagttattaccagtttttaattgttgggcttttgagtttgtgtgtgtgtgtgtgtgtgtgtgtgtgtactagaggaaagccttgggagtcacagcaagtcccagaaatccagctgtctctgcccttaaagcactagaatgacaaatgatgacactatgtcagatcctgtgcttgtgaggcaagcactttatgaattgagctatttctccagccctggtcttatgatttatgatttttttaatagtcagggtttcaagtagtccagactggcctcaaatttcctgttagctgaggctggccttgaactcctgattttctacctctgccttccgagtgctaggattacaggcccacattgatgtacccttccttccctagtttcacttttgtagtatttctataaaaacttttttagtaatgctttcttcccttcttttggattattttcttggaatatatttccaaaattgagttagcaaataaaggttctaaaaattttataactcttgccagatatttcttacagtgctgttattgtataaaagtatctgattctctagatagatctcatgtagtgaaagcatagaattaaattaaaattttttcgctagttttataggcatacagtagcaccttgggttgattgcatttttgttttctttataaattgaaaggtagtatatcaattatattgttttgtcccaatatgccaaattatgaattagttcctgctgatggtttctttattttcagtctcaaatagtttctgtaaatgtaaacccttggttttctttcctatcatagtagtcactttcttttggtttgagagtaaaatatattcctatcttttgaaaatcaacaaacatgtcttcttaaggaaattcaaatcttgacttagtaatctatgaaatcttaggcaaattatttaatgtctccaagccttgattttcaaatctatatgataaacaaaataatgcataccttttaggaatgtactaaaggctaaattaaataatacatataaatagctttaagtaacacctgacacacatgagaacttgtgcaagtagttgtaaagaaaatactcaataaataattgctaagagagaatgaacaaactaggagatgattgtggaagactatatgggtaaagaatttatttactgattccctactggttactggtcattgtgctaggtattgtgtgatacttttgagtgtgcgtgcatatgtgcttctctctctctctctctctctctctctctctctctctctgtctctctctgtctctctctctctctctctctctctgtgtgtgtgtgtgtgtgtgtgtgtactagagacaaggtcttaatattgaaggctggctttgaactccctttgtaaaggctggtcttgaactcctgataattctgcttccacctcccaagtgcctggatcattataaatgtgtgccactacactcagatagacagctttgtgtacagaaggaacaatctgaattaagattcaggaacagactgtaggcagaagaataaccggtgattagactagacaaatattgagtcctgggacagggtgattgtaacttggtcccatacatatactagtaatccacctgatgtttgagatacttagtgatatctggccatctctttttgttgcagagttttggggaaacattgccaaggaattttattggaaaaccccatgccctggcccattcctccagtacaactttgatgtgactaaagggaaaatattcactgaatggatgaaaggagcaactacaaacatctgctacaatgtgctggatcgaaatgtccatgagaaaaaacttggcgataaagttgctttttactggtaaaaatatttatagtctgtgacagataaaaatctcgtatttatatgtttcataattcacaatgtgctttatttttacattgaaaaatattgaaattaattaatcaattaattaattgtgtgtgggtgagtgtgaaggtcagaggacaacttcaggagtcagttctgtgggtcctagagactgaactcagatcatcaggcttggggacaaatgccttttacctgcagatctatcttgctacccccacaattcctacatccagattttttgagacagagtcttactgtgaaatcctggttgatctggtatttgctatgtaatgaaaactggttttgaacttgttacaaccctcctgcctcagcctcctaacaggtggaattacagttgtatgccattcacattagactgtaacaaagtactttacattccataaatttacttgatccttgcaccaaccaagatgagtaagcaaagtattgttgatttgatattttattaagcaaaaatacatcaaggaagttaaattaattcttcagattacataacttctggtaacaaagtcaatataaatcaagtgatcctcctcttcttgatttatgggtggagatgaaaataatgggtatatagcagagaacaggactaggttgtttgtttgtttttcattcttgctctggaacaaaaaaatgagtttaggtttttcaccagctctatcattgttatcattaattttattgagttaaaaaggttgagaactatgtttaggagcctaagaaatatcttatttgatgctcacagtaactacaaaagccactatgccttgaaatatttctttcttcctcccttccttcttttcttttccttcctttccttccttccttccttccttccttccttccttcctttcttttctttttcattttggttttttgaaagagtttctctgtgtactctggatgtcctggaactcactatgtagaccactctggcttcaaactcagagatctgcttgcttctgtttcctgaatgaggaatcaaaggtgtgtgccactaccacctagcaacctggcaagctttcttttgaaatatatatgttttattaattctttgagcatttcttaaaatgtatttgatcttattaaattccaactcctcctcctcctaattcatcccagatctaccctcacatgcctaccccctcagacctgtctgggttggatccccaatgtatgttaagactctaagaaacagtgtttagtggaactccaatttgggaagtactgctttaagtaatctaccaggttaattccaatgctaaattctgtggtaagaccttattacttggcttttacatgagcacctgttcaataataatttttaaagatactgagtaccagggagagatggctcagggttaagaaagcatactgctcttgcagaagacccaagttcagttcccagaactcacattgggcagcttaaaccgcctataatttcagcttcagggattctgatgccctcttctggattccacaggcacctgaacacacacatacacacacacacacacacacacacacacacacacacacacacacacaccggaaagagacacatacacaataataaaaaattgtaaaaagatattggatattcagccttgtattaggtgttataaatacaggggtagagaaataggaaaaagtatcaaatggacaattaattttccattctttttatgtttatagtaaagtaaactatgaatggactgcatttgctataataaaataaaatacaaatatactagacatatagctgctttctttgttgaacccatatttgtaaatatactcaaattgctttctcttctttctttttcttttcttactcctcttcctctattgctgctgctgctgctgctttttgtggtactggggattaaacctaggactttcacacatgctaagcaactgttttatcactgtgccacactcccagctcccttttaattgtctttaaagaagagattggcttcctgttatcatagatgagaatttaaatctgaaacacctctaacttctcctttcactaaacattatttttaaattaactttaaatcacattctttataagcgagtgtagtaagtgtgttaaaatggctattccttttcctttttttgttttgttttgttttgttttagagctatggttgcacatatctcaggctagcctcaataacatagttgctgagaatgaccatggaattctgatcctttgcctctacctccgtctactgagtactgggattatagatctatactaccatgcccagtttattctggggacttgtgcatggcaggaaagcattctaccaatgaagctatatcccagcctttgcatctcctttcatgtacaatttttttgttttctctggaatcatcaattacctactatctttttcttgtactatttgcctttatcatatactctgaatttcctagactttcttacatgtattctaagaccttctttctctccccacaagtcttctctgttagggtccacctttatgtttttttattgatgctctaaaaataaagattttagtgatatttttctggtagtgttaggatttgtgctatatataatttttttagcaagagagtctttactatatagcccaggctattgtggaactcactatgtaacccagtttggtctcaaattcatggcaatcctcctgcctcagcccaggtactgagattacaggcatgagtcatcatatctggcaagctttcttttcttattgctttcttctcagcttaaatagtgtcatttagatgaatgcaatattactagcatactacatttacagttcatttcttgtcttgggacatcactgaagaaaaccacaaggaaaatagcactcttaagagcattctctggttagctgaaacaaaaccaccacaaggaagaatttggccttttactttggcttggaacataataaatgtttatagaattatattatttttagaactctatgtgactgttagagtccacataggtcaactttctttatagattagcaaatctaagattagctagagagggaaagtgatttgtatcagggctatttccctgtttgaagataaaatggagactaatcaccagagagctttactcctagtcaactattcttttctttaatatgacactgccttgttcaaggagtctaacgctaggcttggcagataaaaaatagaaattgaccatgttagtcaaattaatttgttttttcaaattgaaatttaaaaaccagataaagtttgttaagtccagtattatggggtttacattctattttgggagaccagataggtatttaaaattgctgtcaccaaaaagcaaacaaaaaaaatcaaacaacagcaggtagaggcagaaagatcaggagctcaaggccatacatggctacatagagagcttgaattcagcctgggctgcatgagaccctatcccccaaaacccagagcaaaaaataaaatatacataaaaatagcttttatatagctgggtgttggtggcacacgcctttaatcccagcactctggaggcagaggcaggcggatctctgtgagtttgaggccagcctggtctacagagcaagtgccaggataggctccaaagctacacagagaaaccctgtctcgaaaaaccaaaaaaaaaaaaaaaaaaaaaacaacaaaaaaaaccaaaaaacaaaaaacaaaaaacaaaaccatagcttttatattatgcagttgtcaactaaataaaattaaataggatcacaaactcatgtgtccaatatcctggcatggtaaaagggcttaatagatattaatcactattactataattttggatagtaaaaacatcaagtctcaccaagtggtcagcactgaaaccatatacatacaagcaacataaaacagacttagcagattgtatttatgtatttgttcacacacataaaataataatcatttttaaaaagagaccatgaatttgagagggagtgaagagggaatatgggaggtgttggaggaaggaatgacataattatactttaatttttaaaaatagcaaaaactaaaaattattttgataagaaacaaaacaaaacccatcatatctttttagaacaaaagttttatgcaaggaacaatttatttattcagcaaatactttttgagaacttattgtataccaggcactgttctgaacaaaacacaaaattcttttttttattcagtataaagagatggacaataaacaaacaaaatgaaacagataggggttgaggagatagctcagttagtaaagggctttccttacaaggccttgagtccaatactcagaacacacacacaaacatgcagacacataaacaaatataacagacagtgataaatgttatataaaaatgcagatcaccaggaaaaggagtgacagtgcagagtgggagtgatgtgggaagatcctttgctagggtaacatcatttgggcagagatttgaaagaaataatgcagtatgccatgcagataattggggcagggaagagagatgttccagatagatggaagagcaagtgtgtgctgatgctttgtgtgcttgaagatgggtaaattagtatagctcgagccctttaagacgggatcagggacaatacggggtttggcaggctgctagatcatttagatccatggaaaccaatgtagattgttactttttgtgcatggtgaaaagggaatgcacgagacagtcttgagcaatgacatgacaataacttgcattatacttaggacctgtattttaaatgaaaataaaaagtagaagctgtgggaccaattacaaggtagaaatacatgtgagccatgatgatttagataatagtggcaagttgtgaaggtggttaaagtgctcaaaatccagacctattttgaatcaagagtccatggcatttgccatcatggaaggttctaaatgatcttgcagtctgctgacctcaacacttctttgatgcagataaagtccaggaatgggagatcactattcttgagatatgccaaaagattcttataaagaagaatgatattgccatagctagatttaagaagattaatctggagttgggcaaagtggcacacacccttacatttgagaggcagaagaaagagcatcaaaagttcaaggccagcctcagctaccctatgagtttgaggcaagcctagctatttgaggacctgaattttgtgaccaattattatattattgtaatataattatacatatgacaccatgcttggcttcttggagatattattttaatgtatttttacatgtactcatttattcagtgtgtatgtgtacatgtatgcatgccacagcatatgtgtggcataaaatattatattgatgatgtaaatcattaacattcctacctactgtactgagacagcaatagtgacagagaggttacaggcaaagtcttattttggagaacacatttaaccctttttaaaatgagtatgtgcctttgaaaaattttagattaaacaagagaattcttggttctttcctcattcttcctctacttctattccattcatacttatctataatagtttccttccattccactcccattagccatctgttctctcctaccatgtaggttctggagatcaaactcaagttgtcaggcttggtggcaagtgttcttatctaaagagccatcttgctggcacaagatggcccttttaaaaagagctaatgcttaatctagccatcctagtttttatttggatttcttttacttacacttgaattacaaacatactcattacaacttcaaaattttacatctagggtttttgaattctaatttctttgaacattttactttaggatcacttttagagtccatagattttccttacttctcaaattctaacactgtcccttaacattaatgagttcaaatcagatttattctttaagttatcatactcaagaaacatagagctctgtaggatatactatatggaaggtaaaaagaaattattagatctttcatacctttgttacctgccttgtagttccttctgacaaacctagaaataatcctgtaaataaattaaaaccacagagttacactgtaaggtgtttccaatatttggctactggaggcccatcagcagagacatcaatgtatcttgcctctttaagtcttagttttcccatttgtggaatggaaataacagtttctatcacaggttgttgtgagaagtcactgggataatttttgtaggagcacagctaggagcccaaagccacattacattgtttctttcccatgttcctgtggaggctgatatatgtgcgtgggaacttgctgagttcatgtgaaacctttgatctattgaagggttcttgttgttttatggaggaggttatactgagtcctcattctctggttcctcacatgatatagttccctaaataacccttttgtcattagctagtcaactccagacatcctggttgtctaagatctctcatattccagttatggtcttcctcacacatcacactgtttccatgctgtgacttttcgtgtctatgatgacatcagctacacaggcagctgtgctttaaccactcagcttctcacagctgtctatactacctaaggttgactgatagattgatttctttctggtatcttttccttataaatagggtctttgttgtgtagtctgacaggaaatcctcctgtatcatccacctaagtgccaagagtgcaggtatgtgccaccactcctagctataaatctgtttactttttataataataaactatatctcccatttgctgcacttatgtattttttcccatatatttaacatgggtatggttcataacatttgacagataaggaatttgtggctcagacagtacaaatgacttggccagggtcttaaagtaattatgcttctactttcacagcctttgcttttttgatatttggccatttgtctagtcagtagtttattaagagggtataaggctgttttgggaaatgtcaactactgtttataaagctaaagatattaaagtgaaagcttaataaagtaatatcttttccttaactgagatatgctcactcattaaataattttccactgaatatatacatcataacttgagaacaagcttagggcaatacataggggatcatcagagaggcacttttgtagttcaggaaagagttgacaatagtgataatggtagaagtcagagaaatggtcagattttatatattatgaaggcaaactcaatagactttgcagatgggcttgttatatgatctaaaaaagtatctccaaggagggccagcaatatgactggtagtggtgcttgctactaagtctgataacctgagtttgacccccagaacctataacttgtcttctgacttgcacaatataccgtggcatgcatacacatacacattgaataaacattaaaaaagagtatctccaaggagccaagcatggtgtcatatgtataataccagcactcagtaggcttaaacaggagtatgaggctaggctacatagagcaactatgtttcaataaaaataaacaaaaaaagatacaagtttttccctaccttttttatcaactggaaaaatagaatttccattattctagatggataagatacttgagagagaagttctggggaaaagaccagaactttttgtttcatgcaaaaacacaaagttgtagttgtgacaagtgctagcaagtcattgaagagttcaagtatggatatgacatgccagatttatattttgaaaaaaaattcttttggtcattagtgcatttaaaaagataagaatcccaacctgatgacttataggtagaggcctaagctgctttgggattttaaacaaataatgaaatccttcctgaggtttagttttctcacctttcaaaagggatagcaaatcttgtctgtcttaaaagattatgaaggagccaagtctggtggcacagactagcagtctaactacttaagagacttaggcagtagaattgagagttcaaggcctgcttgtgctgtgtaattaagtttcagtccaatgtgggtgatttaatgagatacagtctcaaaacaaaaaaaaaataagtaagaaggttagggctacagctcagtggtaatgtggttttacgtggaccctaggttcagtctccagtaccatcaaccaaaccaaaccaaaccaaaagaactgccacaaggattagctgaagtttaaaatgaataaatatactacaacaattagaaaattatcaaatttatagaaaagttgcaaatacaatacaaataacctttccctgaacaatttgagggtaagataaacaagaacttttccctctataactctaatatgactctcaaaacaaggaaaacaatattcatatatcccttgccatctaacccttggactccattgctgctttgttgaaattgttccagtagggatactatttcagcccagatacatagaggagggcctaggctgtcccccaaatgacgacagattttgatgattcccccacagaaggcctcaccatccttggggagtaggtggtggggggtgggttgtaggggattggtaaggggcatgggaggatgggagggagagggaatgggggtattgatatgtaaagtgattgtttctaaagaaaaaaaagaaacaagtttaagctaaggcttagctttcttaattaataataataataaagaaattgttccagtaatgtcctttattgcaagagggctgagctaaataaaattaacatataacacataatattaatatattatatatggctgctgtgtctttttagtctccttcagtctagactagtcctttagtcttgactctcatgcttttaaaaggctttcttctcagtcttaacagccaacaaaatgtaacctagatactaagctaaattggttgctatttattttataccagtgtatattaagttagaaaatcttaaatctgatatctagatttagtgaacacacacacacacacacacacacacacacacacatatatatatatatatatatatatatatatcttctcttctagcctctagcagcaggttttaaattttttgatatttataggtaagtttcagatactacagttaagtatttaggtaataaacaagagaaatctggtctttgtcctcatggagctcacatgattgtcagctgcaatcttctttaggaatgaattgttaggatcgatgtgaaataaggaaacaaagaaatgtaaaaaaggaaattatttcaagggagaatgtggagttgtggagggcatgtctctaggagcaagtggctatacatgtgttcccatgactcttgacaatgccaaggactatttcacttttatatttgtttacttatttgtttggtgtgtgtgtgtgtgtgtgtgtgtgtgtgtgtgtgtgtaggccaaaagacaatttgtcaaaggcatgtctttattttccaccatgtgggttctgagaattgaactcaggttggtaggcttggcagcaagcaacctttcccattgagtcatctcaccatccaccaaggactattaaagttgacatatgagatcttccttgtttgattgaggttgtgggtctttcaggaaattgtcaagtggtcgaaaagatgatggtaactgtggtcttggccacagtttgaagttcaaagtagatgggagtgtcctgtacttcccacggtgcttctagagttttcaggagagtgatttttccatgttcctttggtgcagtagagtaaatagtctggaattcaaaacctgaccctagttacaggtttacatttaatcccctgtgtgaccttggcaagcctcttcctctggacttgtaattttcaaatgagaatagtaatcgttgttctacccactgctagggtagttgtgcggatcaggttaagggtgacctttagagtggttatatactatagtcatgtgaggaataaactgcacctgtattgatttactcaacatgtgagcaggtatggcattacttttctttgatatttatatcagctaagttttccctctaccccatgtaagcaagtattcaatttctgtataagttttatactctgaatctttcatgaatgagtacactgatccactgtagaaactcaggtacatttgctgacatatttttgttgaaactgatttagagaattgctcccctacctctgggaaggagagagaatcaacaaatgtaagatagactagagaatattctgtctaacaccagcctttcccctcttccaactctcttttcccatcttatattttacagaggaaaaaataatctgagtttgtgtaaatccatatattgaattagggataaatagtaaatatagatctagaaactccatattcagaactaggggatcctgtatttttgcatgcaaaagtaagcacttgaaaatgttgttagaagtctaggaccccaccccagcctttctgtttgttttttattttatatgtatgggtgttttgcctgcatgtatctatgtgaacctcatgtgtgtagtagctgtggaggtcagaagagggttcagataccctggaactagacttatagatggttgtgagctgccatgtaaatgctgggaatagaacctgggtcctcaggaagagcagagagtgctctaactgctaggccatctctccagccctgccagcctatttaaccagaatctccagaaataaaacctctgaatctattttataagcttctcaaatagttgctatataggaatagagtaccccagaaaattctttcagcactggggttatatcagttgaaagcacatacctaggatatgtgagggttcaactacctccataataatgtttaagataggaaactgacattttttaaaacataagagaaagggtaattgtgaaagagtgggaaaagaaaatcctctccagatttcctaatagatcagtgttaggaaaagattacatacagaaattgaagaactggatttttagtcttttaaaatttcttggttgggcattggtggtgcaccaaggaggcagaagtaggcaaatctctgtgagtttgaattccttcaaccatacagttatctgggctttaacacattgattttcttccttaccctttccccctggatttttgaaaaaggccatgatatttaggaggaaaatgtcttgaatagacatttagaatatcaagtttcagggtccaaggtgatgattactaaccacatgtcattttatatttaaagtaagattaagagaaagcaaactttatttttcactcacattttaagtgtttactagttacatatgggtactggctactatgttggacagcaccactttagaataaagtaatatgctagggaaccccaaggccatcacttactatttctgtgccttagagcaagtaagaatggtagatctcaaaagctctattcttctttaaccttcatggtgatttgtgattcaattttggaggtatgccccccctccacctttctttcagctttctgctacagcaagagcagaagtacccaaggggaacattagttgctagtttgtcaaattatgttgtttccacttcctactcccttggtggaaggagaaaattacctgagggtatgcttacatcagagttccatttgtgcaacactttatgggtcatagaactctttcatattatttcttcatttttatagtttcaaagttttctgtttctgttttgtttttctgagacagggtttctctgtataacagccctggttgtcctggaactcactttgtagaccagactggcctcaaactcagagagtggcctgcctctgtactgggattaaaggtgtacaccaccacacctggatcaaagtattcttattctgccaggtatgtaatgttatgtctgtatcccataattccagaggttgaggccatcttgggttagtgagatttggtttcaaaagaccgaagtttggagatataactcagttctagagcatttgcctaacatgtatgtacaaggtcctgagtttgatcaccaatactaccaaaataaaataaaaaagaaattcgaggtccataattttaataatattcatgaatataaattatatgggggaaatttgtcaaatgagaagtccaagattggtgtggtggcacacatctgtaatcccagcattcattggaggattaccagaagtttgaggccagctgagctacatagcaagattctgactcaaataccaaaactctaacaaaaaccaccaatgccacattctctggaggatcatctagtacaaataagtactagagttttcctggacaaactgaatgatcctattcttcaactctatagtatatgacagaggatgtcttagtatctgcattattagcattatttgaacatactttaagaaagactggttttgcttggttctcatggcagaatttgatttttagtgtctctgcaaatctcagattctacttgttacctccagagttagagttcccaaaggagcacatcctatctttgaatacctctgccagttagaaagactttctgtatacccagctctctaaagacacctaactactccacttatagttacataatgctaacatgcttcatacccataataatcattcagaagtattagttcagaaaaatttattaagtacttactgtaaacaaggttctgtgaaaaacattggggagtcagcaatgaacaagaacaccttggcctctgctttcagggaaacagctaattttctttcatcgatttgctgttagttttggtgtgtgtgtttctatggtgtgtacatatgtaaatgttcataagtgtgcaggtgcataagggggcaggaagttgactttgggtgtctgtctctgttgctatctgtttgagacaaggtcactcaacctggagctcaccaattcagtaagactagctggtctacaggccacagagatcttcatttctttaattcaccagtactggcatttcaggcacatgctgccgtacccagacatttagcgggggctggggatcccatctcagatcctcacccttgtgcaataagcactctactgactgaaccagctccctagcccccaaacagccaattttaaaagtaaatcacataagaatagcttgagaaaataaaaagaaaataagcagaatgtggtgatgaaaaacaagaaggggtggtgctatttagaattagagaaaatctcactaggtagttgacatttaaactgagatttgaagcataagatagaacaattcaaagaactaaggaaagatagtaaatgaacatggggtgttctgtttataagaaagggagtatgtttggaaccttagaaagcataataggagaatggtacaagatgaagtagaggaagatataagggacagaagtttggtttttcttccttatgcaatggaatccattggtgagttttaggcaagaggctatgtgcaggaagctatgtggtctgatttatgtttttaattgagcattctggatgatgtgtatataaaaggggccactatggtcatccaagcaataaatgaaaattgcctgtaactaggtgaaagcaacagagatagagttatctgaaaatggctaaagcacctctcaatagcttctttttccccagataaacatctggttaatgctcctctaataacaggtttgacttcttattgcagtgtttgtttttgcacagcctggcccactagagtagaacttcccccaaaaaggttctatgaataaaccagttttcccatttgtcttttattgggaggcagggtattggaggatcttcatgcatgtcgggcaagtacccagtcctaccaaccatctttcttccagtcctttggcccaaatattctttacttgtagttgtaaggaattaaaaatctccaaactgatgactctcttctcatagaaagagagggtctctagccttctctgttgttaatcacctaacagtctgatgacttgactatgacattgagtaccctattcagctggccttagctggaaaaggcaaagaaagaacatgacccttgtcctctgggtgtaatagaaaaaataagacccatgtaaatgcagtacaaggttgtgtgtgttcaggtatcacaggaaaatgaagtgaaaagggactggaaaggtgaaagaattttcagttttgggggtaggtggggacaatttcatggaggatgttcattttgaaggataggggtgttcttccaagggatagacaagtatagcctcactgaaaaggcagcccttcctgtaattccagcatttgggaagctgaggcaggaggaatgctatgtgtttgaggccattccaggctacatagtggttccaccccagcttgagtgatgcccagcctcaaaataaataaaacaagccaacatttgagcagtgattcaaagataaagagcaagccatgtggtcatctgggggaatagtgctacaagtagagggcaaggaatctggggtcaagtgtgtttgtcaagcactaaggcagccacgtgtatgaagcagagggaacaggaaaggaaagcagaacaagaacatgtgagaatagaaagaattaagaattagtaagaattaatagactattggtaggacttgggcttggactcaaaactgtataagaaccaaccttagtgttttgagcaaaagaataacactctgacttattctgtaaatggaataataaaagcccagagtcatatatatagaggaaaatgctgaaagatcagagagaaggggcaagccaaagccacctttaccttattagcttcccagtgaaaaagagagtgagttcctgtttcttcctgcttatatcctctttctgttcagccatttcacttcctgtctctgcccagccatctcacttcctgtctgtctgtacagaccttcagacctctatgtttagctagtggaaagctccgtcctctggtcttcagacaagttttatttgtacaagcaagattccaccacattacccattgatgattttgacaaggacaatagaagtaattgtgaaaacacacatatgtacatatatttaaaattttagtatttatgtgtttgtatgtgtagctgtgcatgtgcccaaagaggtcagagaggtgctggcttcctaaagctgaaggttcaggcagttgtgagccacttgatgtgggtgttgagaatcaaactccgttcctttgcaagaacaatatatactcttagccactgagtcatttctctagcccctaagtatattttcaactaccagtggactagagtaaagttggagggtatacagaagggctactttgaaaagactctctgtagaagattccccaaaagaggaacatgagaagggttagtgatggtatatcctttgttatctcactaaccacatggcttccaagtgaagggcaagtaggcttatggcagaagttctcaatcagtaatctatcagttaaatctctcattaatagttctgtttggtttatggtgttttttttcttgagacagggtttctctgtagctttggagcctatcctggaactagctcttgtagaccaggctggtctcgaactcacagagatccacctgcctctgcctcccgagtgctgggattaaagatgtgcaccaccaatgcccggtggtttatggtgttttaaacctttgaaaattagttatccgtatttgaaaatttgacagaaatatgttccagacctttaaaaatggcaacattgagccactgaacgaaatttaacaggagctaagttgggcactggatcctttagccaaagcatgtgttgtgttttctagttgattcctctattgttgcccctaaactgaggctgaatatagttctacatatattattactctcatatagaaaaattaagaggaaggaaaataatttcctgtctctgtcaaattttagttatgtgatctacttcactcatttacctggacacggttaatatggttaattttttcacattgtgctgagaattgagcccaggaccttgcacatgcttgaaaaatactctgtcactgagctcaagcccagtccctgttaatttttgatcttgcaattccccttgtggaagaaagaagactggactctgagtccttgtacctgttcttctgtaaacaattattttttccaaccatataactaacagtctccttgaatctcagagttaggccaaattaattgttctgttaaaagttcaaggatcctagtgggctttggatcttgaaaaggtcaatttttgttcccttcccccttctagccagccagggtcccaagcctggtgtctgtgacagagaaagaagacactggaatgagtaatgtacctatgtcaataatttatagcttacgcacatagccaaagagaggaacacacactgtgtgtgtgtgtgagagagagagaggggggttcaagtaagctgtgcatatatgagctttgtacatctgttctcattcatcaaccatacatcaaactttattttcagtgctagagatatagcagtgagcaagacaggttaggtctctgatataatgtagctcatattcctataaaggacatgaataataataagcaggtaaaataaatgaaattatttcaaataatggaaagttttgtgaaaaaataaaagcagaatgatttgatgaaaagtttctaaaaaggcaagctgtacatgtaggtgggtttgtaaatgtactctcaggcagacttatgtttgaattctgggcacatatatttatgcttatttgtgtttgtgtatgtagctcagcagcttttgtgagtataatgtttctatattagtatatatggtcttattcaagagtatttacagaggtgagttggtatggggtacacattgggggtacatgcatgaggacatacatgtcagcatcagctgtagctggagatgttttgaagtttctgtagcatttgacagtgggcagcttttctgcttctggcattcagggacatttgccagcttcccctctccttgttctgtcccattttagtaagcttgctatgcttggcttctctcagccaaggagaagatagtaactgactcatcaagccagaagctggaaagaagcagatcatttctgtgtaacttcgctcagtaagaagaggcctggcatccttgccaatccagtcccttatgctgtgaggaaatagtcctgacttgaaatcagaagatctgaggatctattcttggctctgtcacttattattgtgtgaccttggctggctacttctctctaagtttcagtttcctccttcataagtattctggatagaaaagaaggggagggagcacagacagctcgctggggtatattatatagtattgcatctggaaaaggagggcagaagcaatgaatggcatggtaaaaagtgtggaagagtctgggcagatggcaccaccaagcctgatgacctggaacccacatggcggaagtgtgaacccaactcctcctggttgtcctcaaacctccacacatatgccatagtatgcactcttccaaacaaagaatataaaatggacttttaaatgtggagataggcatgaaccttgtgtataaggaagccagaaagatgaataaaatttaaatttaccacccttacaagggtctacttgatttaactgatgcctacctcttgttttcatctagtctcttgcttgctgtattccaaccacattgagttcctttttgctctttgaataggcctcaattcctttccgtctgatgctttctctgcccagaatattcttccaagaactgatatggtcacctatttcttattgaggttttagctgaaaaagaacttccccaggcctttcctgacactctcaccttaagtggttatctcctaataattatcaatatgtaaaatacacatatctttggccctaaatttgtatttttattaattcatactatggatatatttgcaaatagcatatgaataaggatgatcattgaattattacttgttaaattaattattatatacaaataatagatattatatacaaatagtagataaagagaatggaaccatttttgatagagaatggtaccaaggcatatatttaatttttttttttggttttttgagacagggtttctctgtttttttttgaaggctgtcctggaactagctctgtagattaggctggcctcgaactcacagagatccgcctgcctctgcctcccaagtgctgggattaaaggtgtacaccaccaacgccggacctatgtttaaattttttaaaaagcaagctgattgagttatacatgtaacatttgtccagtttattgcttgtatatagtacctaaggctaaaactgtaccttagtggcagaacacttgcctggcatgcctgaggctctggtttacatccctattatcacacaactacacaactgcttgggtatggtggtatatgcctatagaatgagccctcgggaagttcagacaggattgtgatcttgaggtgacttgggtcacatagctatacttggtctcataaagaagcaataattaaaatgccatcatttgtgtataaaattagaatatgtaagaatacatgcacatagacaactttgtctaacaagtgtattccctgagtacagcaccttttcctaaatcttactgtcccatgctgggctagactgaaatgagcttatccttttaaaaaatgtctaatattttaagttcagtttttaatttctgcctctattggtatctgaaggatttttttttaattatgaagtgtttggccatggctcaggcttcttaatggctagctctttctctttttttaattttattttattagttcaaattaagaacaagcttgcttcagatgtcaatcccctctccctctcttcccctcccccccaacatcccacctgcctttagccatcccccctccactccctaggcagggtaaggccctcaaaatgaaggatttattaattatgcagaaagtatagacttctttccaagtcattattttggtcatcacaaaagccctccatattactaagagtggccttgtctgcaaattgtttctagaaagccactcaaaatatcagtagcagtggttgtcagcaggcagggtgattggcagatatgattaagaggtacacttatcaatacaatctttttatgcagcatcgcctatattacttattaaaactcatgaaacagcagtagaagggagtaagaaaaacatccttatatgtaaattttcatatgcaatcacagtaattcctttgcatatgtttattattgttgaaacaggatctcactcttttaacccaggctggtctggaactcactgtgtggtctaggctgacctcaaacttttggtaatcctcttacctcaaccttctgagttctaggattacaggaatatgccaccacacccagctataattgcatatttttaaaaggtatttttcccagtcactcagttttatatcgctgtattttatttattcatagtgcttataacttacaattattttggtttaattgttgcttatatattacctacaatatcattagtatacaagctctgtgatgttgggtatcttgtacatcagcgtcttgttctacacaagcatattgcatatggtagctgttgaataagcaaagaaagaataactaaaagaaaccaggccaaactggtcaagagatagaaattatgctataggaagtgggtgatattttcattgttgttgttattgagttgaaaatatgtactcgcctttaatcctagcacttgagaggcagaggcaggtggatctatgcgagttcaatgccagcctggtctaaggctacataatgagaccctgtctcaaaaagaaaggaaaattattttattcataactttatttatttactcataggtaaggtctcatttagcccaggctgtcctgaaacccaccatataggcaaggatgatgatgatcttggacttttgatgcttatgcctctacctcttgaatactagaattataagcatatgccaccatgcctattttatacagtgctagagactgaacccatggcttgatgcgtattaggcaagcatgttaccaactgataatacttcctaggccccccaaatgttttatttttaaagatgttacctctggaattaaaaataagtatattcattttagaaagtgttttatttttatagaaaaggtaatttaaaaacctttggctaggctgggcgttggtggtgcatgcctttaatcccagcactcgggaggcagaggcagggggatctctgtgagttcgagaccagcctgggctacaagagctagttccaggacagccttcaaagtcacagagaaaccctgtctctgggaaaaaaaaaaaaacaaaaaacaaaacaaaaaaacactttggctaaagtgtttttagcaagatggcttatcatctaaaagtgcctgtcactaagcttgataacctgagcttgatcccagaacccacatggggtagagagagatctctgattaacactttttgttcattcatcagaaaataaaggtttataaaaatcaatcatgttctgtgaaataaaaatgattgaaaatatttcattttaggattgtcctgtccaagaaaaagaaagattgaaacaaaaaaccagcatgtgagtcaggtgtggaggtttatacctgtattaccattactttggagtcagaggcagggagaattggacgattgaagccagcctggtctgcttagtgagaccctgcaccaaaagacaaatgaagggaagagggagggaggggaggaggaaaaaggaaagagtcagtgagatagataagtggctaaaagagttagcagtgctagcctgaagacccaggttcagtccctggtctcataaaaagccagatgtagtggacattggcaatcccagaactccttcagtgagataggaggcagagacaggagaattacctggaagctcctgaaccagctagcctagagtacaaggcacagcagaaacagtagatcctgattcaacaagatgaaaggcaagaaccaactttgacctctacgtgggcaccatggcatgtgcacctacccacacacaagtaaatatgtaaggatttttaaaaagaaaagaaaaaacagtgatgaaaaacaggacaaaagctctttctgccttcttggtgcatgttgaagcctgctggaaacaggatttcttcttcctttttcttcttcttcctccgcagcctctttctcctcctttttgtcgggaggaggggggtgctggggggaatcaagacaggatttctctgtacaacagccttagctgtcctggaacttgctctgtagaccaggctctttgaactcagagatccatctgcctctgcctgccgagtgttgggattgaaggcatacaccaccactgcccatattatggaaacaggacttctaaaaagcagatatgtctggaaggctattgggcaaggccatttttgctagctataatcaaggtctctagaaccaaagagtgcacatggctcttcttaaaatcaaagatatttatgcttgagaagaaactgaattctatctaggtataaagaaaaacacaatagcatgactcctggagataaactgaataaaaccagagtaatctgtagaaatgtaactctggcccatggaaacaatggcatggtttgtgccaaattctaaagcaactgtcctataaaggccactggacacagaatctatgtgatgctgtacccctcacagatataaatatttaaaaatgggtttgtgcttttgtttttaaaaaaggagcaaaataatcaaactgtattcataaggacttacaggtaacccaagattagtcttgaatttaacatcgtgcctcatctgctgagtattgggacaagaggtatgtgccaccatacctggtttcatttgttgtcttttttaaaaatgactatctttgttccccactgtcccaggccctcatcccatatttccagatgcttggatagtcgagggactctcatatgccaggccagtgttgtaccactaagccatatcctcaagtccaaagatagtgatttttaaattttaaacttatgtcataattacctaatgtttctctgtatcagctgtaataaagaagcagatttatagtgctatgcttcagtgggtaacttcatatccatgctcatgcagatgaccctagttaaactcagtgggtcacaaaacaaaataaaatgacatgcaagtgggaagggaattgataaggaagtaagatgctgttagtatggggaggagtgagtgtggtcagaatatatttgtacctgtaccaaattgtcaaagaacatgtgtgtgtgtgtgtgtgtgtgtgtgtgtgtgtgtgtgtgtgtgtgtgtgtgtgtgtgtgtgtgtgtgtgtgtgtgtgtgtttaaagcagcgtctaaggctggtgacatggctcagtggttaagagcaatagctgctcttccacagaaccagggttcaactcttagcactcacatggcagctcaaagtcttctataacccatttccaatgccctcttctgaccactgaggccaccaggcactcacataatttacatgcatagatgcaggcaaaacattcacacacatacatttcttaaagctggcaaaatgtctcaataggtgaaggtgctttcttccaggccagatctactgagttcaaccccctctacccacatggtgaaaggagagactcattattacaagttgtcctctgacctccacatatgtgccatggtgtgtgtgtgtgtgtgtgtgtgtgtgtgtgtgtacatgcacaagcaaataagttattcttagattttgcattctgatgcaacagagctgagttgaagtccagaaatctatattcaaacaaattccttaggtaactggggcacgagcaatgtgaagcccctattctaaataacaatataatttctttcccctgttcatttttttcttacagtatcccaatctggcatcaagtttgtgatcctgctttatcctacgtagtgctgggattacaggcatgcatcaccatacccaaatgcatgtttcttcatgtattttttgagaaaggtctcatgtagcctagactatcctccaacattctaagtaaccagagatgactttgaatccttgatccttctgcctttgcctcccacgtgctaagattgcagatgactggattttttaaaatggtttttgttgctgtttgcttttgtttttgttttagataaagactcactatagccatggctggcctggaacttactatgaaacccaggttggccctgaacttgacacagttcaacttgagaacttcttaccttcatctcctgggtagtgatattacaggagtgggtcactacattaggctttaattcagtcttacactttataaaagtaatgctggatctggtgacacaaaacctttaatcccagtattctggattcagagacaggcagtgagttctaggctaccttgatctacatagtgagttccaggcatgagaccccgtctcaacaattgaaacaactactatagggcacctttgttgcgtcatttctccttaatacaaccctaagataaaagagaagggcttatcactctattttgtcaacataaaaaataagaatcagaggtagacagtacactttccaatctcataaaacatgcatacaagtactttgagaagccaaagtatctgtctagtcagctaaagatgtggtatcaggggactggagtgatggctcagcagttaggtgcactggctacttttctagaggatctgggttcgattccttatctacatggtggctcatagctatctgtaactccagttttaggagattcaataccttcttctggcctcttgtgcaataggcttgcaagtgatacacagacatacattaagggaaaatacacatataaaaatttaaattagttaattaaaacatttttagaaagatgtagcatgagattcactgacaggagagtgtcaacattgatatgaacagatggaattttgtgactgctcctatctcgtttatgagagaacagagctatgtccctaattactgattctttctgatgtatctcagggagggcaatgaaccaggggagaccaccaagatcacatatcgtgaacttctggtccaagtgtgtcagttcagcaatgttctccgtaaacagggtgagtatcagtgtggaagaggaactcggggacctaaccctgagctctctgaggaactgaaaaaaaagaggacaagaaatggaaggaacctggtgacaggaacagaaaagttagctggacgggggccatctgagtgggagggagcaagggatagcaagaaaggtccatcatagttcctgttctgtgtctttttttcctataggcattcagaagggtgaccgagtggccatctacatgcctatgatcttggaacttgtggtggctatgctggcatgtgctcgccttggagctttgcactccattgtggtaggaacttgggctggtgacaggaaccaagggtgagggatagggttttgagaaggaaattggacctggatcatgaagtatcataaatataggtccaaatcagatgttcagtatcttctggaaccctgttttggagatgctgaatttcatgagcacctcccttcttttatcactcaatcactagccctcgccttcccttcaggtttttttttttcttcttcttcttcttccctagttcgcaggtttctctgcagagtctctctgtgaaaggatcttggattccagttgcagccttctcatcaccacaggtgactaattctttcacctttctccagatcctcctacacctcaagtttggtctctagtctgcttgttgatttggggcaacttggggcagagggtaggggctgcatgcctgccttctcctcatcctacttcagctgactctgtcagcccaaatcatctggaagaaccagagtcaagaagctgattcaggaagggccctgtggacattaggcccactgggagcatggtgtgtactaaggcctggaatgtttattgctccccaaagatgccttctacaggggggaaaaacttgtgaacctgaaggagctggctgatgagtccttggagaagtgccgagagaagtaagtgtgctgacctaatggctactaacttgggttgacaggatctttctccactgccagcttccctttgtccttgctatatactcctagaggggcatgggtacatcttgtcaacttcttttagccaaccagaccagtacttcagccttttcttttctctaggggtttcccagtaagatgctgcattgtggtcaaacatgtggggcgggcagagctgggcatgaatgactctcccagccagtctcccccagttaagaggcagtgtccagatgtccaggtgagtctgacactactatgctctcttttgggctctaactccctctctcttcctacccaaagatttcctattttttctccttggcttcttcatcgtaatactgagatctgggaacaattccaggaaagcttcctttaatagagctggctggaaagcaagaggttttgaccttgaatataagtagagaaggaacttagcatgagaaactgtgaaggttaataggcagaggggacccttagagttcaggcttgggtttgggttggaaatgtactgacttgggtgactatacatactcattttgattagagtgagacttgaatgagcgacatttgtggctttggatccaatacttctgctgaaagcagtaggaaagtgccattaacagcctatagtttggcggggcataggtatataaattctggggtccaaaacaatagaggattacttagattctttgatttgaagtatcctgagtagtgttgggactagagaggataatatgggactagggaggttgggaggccaaacaatattagaaattctgtacataatagggtgaggaaaatagaggctgagggcactagtgagagggcaggctgggaagaaagaagacatctaggggttgagggaacactcacccttccctctctctcctctatctttggaccctgctcatcagcctttccattccatgggctcttaacagggtaagctgaaagagaaatccaagtgcatccgaccccaggtatccacttcttcactgcccttgatcactgcttccctgtgtgcttgtctgtatgttcatctgctctctgtctgtttgttccagtgaggttgctgacagagctaagtctgttccctttgttcctgggctccgacatccatattactcagaagggttacaaaatcaaatgtctgtttctgcctctgtccactcatatataacaaggatatcaaagtttgcaatgacatcccagttcactcctgctgcatagatcctttgtgtgagaggaaactgggaaacctgtcagaaagcatatgctgctcatttagctggcgagtagagccaggaaagacaggaagcatatggaggaggcacgaactctgatcttgtgattttaccatcaagttaggaagttagacctatattgtaaaagaaaaaaatgttttatatgggacaacagagaagaaattcctaaatatatctttatgcaacttggaatttataaaccagacataactgacataattaagtactaaattcaacaaaagtcacactgtaggtggtactcaatgctggttagtatggagcaggggcttggagtccgaggccaatatttagttgcatgacttcaaataaaccatgtctcctctctatacttcacttttaaaaattcaacaataaagacatgatatatgattaaacaaaaatggtttccatccctaaagcaaaatataaaggtcactgttcctatgggcttcagtatcttcacaggttactttgaatcttcatggctgacctcttgtgctagtagtacatataagtcctcactctcatgagtatgtggacacagacctgatttctgggaaactgttttacttataaaatttagtcagcaccgggtatgggaatgcacaccttttatccctacactgggaggtagagtcaaagatccctgggagttcaagactagcctgatctacacagtgatttccaggccagccagggctgtatagtgagaccctgccccccacccaaaaaaaggaaggaaacaaaaactaaattaaacttcttttgaaagacaacaaacttggtggtttggaatgtaggctctggagccagactacttgggttcaaatcctatctatcccatctgcttaggtaacttagctttcttgcttcagtttctgtctatatgaggtaacgatagtaactgcacttagagtattttatctatatatatggcatttggcatgtattaactactcaaaatatattaggtgttgtcattgcctttaaaacatcagacagactagcaatttccagaaggaagactgggaagaataaataaataagtaaataaataaataaataaataatgaatgaatgaatgaatgaaatagcatttcttgtaattcagcctcaagcagcaaactcctgggtttttgttttttggagatgaaagtaaagtgaagtacaaaaaaaaaaataaaaataaaaaaaataaaaccaaaaacaagcaagccagaagcaaacacagaaaattaaattagtctcacaaagctcaggtttgtttgtgtgaaaactctagtaaaagctgtagaagccatggcaggcctccagacccctgccttactatgcagttttcaaagcagggcctggtgctgttcgcaggtgtccttctcaaccacaccacttaacatactccatattcccttaaatacccagtaatcactaaggctgttctggcccaaggacaagggccaactcctcagtttttattttagaagacacaatccttttcttctttcaaggccatgggcctcatagacacacatgaaatccacaagcaatgtttgcttcactaacagctcattctgcttcctggtgctcactatcagctccacagtaccacacctactctactcctccctacacacatcacacatacaaaggaaacagtgttataagattataaaaatgctctcattgccaaaccacagtttaactgtgtcttaccataacaattcaacgtaccacagaccagcaccatttataaagaatattgacatagtttcacttaaaagcattaatgccctcagctcaagtaataatttgacaggaaaaaagtatccatgtgacaatgtacacataaaatcatgtagatcttccactaaaagatagggttcttcatgtttccttgccaggacagcttgtctgttttcctccctctgacccctaagacagggtttcactttatagtcacaactgacctggaactcgctatgaagaccaggctggcattgaattcaataggcctctgcctcctgagtgctgagattaaaggcatatgccaccctacctagcctcttatttttaatgacacccgcacttagatcattttttataatgctcatattctcttaagtaaagggcaggtaatacagaaaaacaagagtagttagagagtcattttaatatattagtatatgtctatgtattagagaaatttatttaagagtgctgtatttaccaatcaaccagggccattgaacatccaagagcctaatggaagcagatgtaatggcatataattgtcatatggaagcttagactggagagttgtagtttatttaggcaagcctaaataaaaccttgtctcaaaaataagacaaaataatttactgactatgaaagggcttttagatagccaaagcaaaccccaaacattcctcaccatcttaaccttttccccaggggtcattaaactcatccctaacctttctcctctctccctgaaacaaaggcctgatgttattagataacatctttctctattgacatttataaaatcctgtcagacctttatggcaaaaggaactttctttgtttaaaaccccttaagggactagagaaatggcttagcattaagagcacttgccgctcttgaggggaacagaactcccatcacttacatcaagtggctcacaagtggttccaggggaaccaaaacccttctctggcctccacaggcacctgcatttacatggcacacaagcatacactcatatctacacacatacacataaacaagaaaaaaagaaaaatgagtgacttcccgtggtcatatggcaagaagatagaaccccagcataatttttgagacatctagagaatccagcttcacctaacagaatttagaatggaaaaactagttttcaaagaggtgacagcaagaaaaagaaaacagtttcaaaggagaggcgagagaaacttcaggctagcagaccctgaagacattattaaaggcaaccaaacatagtaggacatcccttccctgagaggaattcaccttggtgattctctaccaacttgaaacaagccttcctgctgaatggaacctgtctcctgaagtaggggctgctgtgagaaaccttattggttctacttctataaagataccagaaaggacttccagaatgggatgggatccaaacacgcaggaaaaaaaaaaaaatccctgaacccaaatctgttgggttctcttgctattaactaacagagttaagtgctcacctataggcagtaactaattctgtttttctgagtgtgtggttgtctacatccctgctgatgtgccaccagtcctatattacttatgtgtgtattcaggctgtgtttgcatagtagtcatttatccaacaaaaatgtattttgaatgtcagatatattactaggtgctaaggctttattggagaaaatacgaatatgccaatgcctcctagaggtccctttctagttggggatataataatcaagaaaacaaagtaactgggaatatgtgttgtattggaaagaaaccaggcattgtggtgaataatgataacaggtgagatggaagtctgtcagacaatggtcaggggaagtctttctaagaaagtggtatttcagttgagtactgcaagattgaaggagcaagtatagtagcattcctcaaagtaatgccaggtaaggggagttctggagtaaaggtagagcaagaatgacagagtaataagcctgttctctttgttccattgtgcctttgaagggcctccttcttttcctgtacccctatatgcagggctcttgctcctccaggtgccaggtaggggtatttcctgcctctatcttgaactttttacagttcttcccttcccattcctgttttcctcttcagatctcctggaatgaaggggttgacctgtggtggcatgaactcatgcaagaagcaggggatgagtttgagcctgaatggtgtgatgctgaggacccactcttcatcttgtataccagtggctccacaggcaaacccaaggcaagtgtgtgcactgtataagggtgaggagtgagtttctgaggaagcttgggatgatcaacagaaactattagatgcagtactaggaatgtgagtgatacatgtgactcagatttctgagcatgtaagtggtcagtatatttatgttacatcagggtgtgataaaggagatggaagagagacaaatgctacaaaagtgcatcagcagggttagaatctttaaaaaggttcttcttccagctctgtgcaggctccatctgttggtcagtagagatggacacaaaaccccaacctgaggacccattctccccacagggtgtggtacacacaattggaggctacatgctctatgtggctacaactttcaagtatgtgtttgatttccacccggaggatgtgttctggtgtacagcagacattggctggatcactggtcattcctatgtcacctatgggccactggccaatggtgccaccagtgttttggtgagatgggacctgggacatggacaagatccttctgggtgacctcttcccaacgcttcttagactgaagaagggagacttatacagggacctacttcctggagaaagagcaatcctgaggggttgtatatcctactagaaagtttcttggcttgtgtaatcagagtttatcgtaaagacataactggtcaaaaggggcaaatactggtcctgaggggatggtagggggatggaaggactactgggaagggctaaaaataaccagatttcattggggtcagtttgaggggatccccacatacccagatgagagccgcttgtggagcattgtggacaaatacaaggtgaccaagttctacacggcaccaacagcaattcggatgctcatgaagtttggagatgagcctgtcaccaagtgagacccctccccatctgctatcccataggtatccttcagatctgagcagtcctttgtgcaatttctttctgttgtctcaactccctgacctggaataggggagggggcaaaggaatgctgaatgcatgtgtattttggctcctagtggtactcagaactttcctctcttccactctcccgcccaaggcatagccgggcatccttgcaggtgctgggcacagtaggtgaacccatcaaccctgaagcctggctatggtaccaccgggtagtaggttcccagcattgccccattgtagacaccttctggcaaacagaaacggtgagtaagtgattcaggaggcttagagacaatataggaaaatggactcaaacccctgatctctgacttccatagggtggccatatgctgacccctctccctggtgccacacccatgaaacctggttctgctgtgagtaaagtgcttctgctggtcctaggcttggcaagggatggagtttggggatttgggcctattagaaagtaaggtgctgggctgagagctatgaggaacttgggtctctggggctccttgtaagctgagtcacagttgcctcattcctcttcttggattgtgcctctcatttgcttttagtctttcccattctttggtgtagcacctgcaatcctgaatgagtctggggaagagctggaaggtgaagctgaaggttatctggtgagaatctgggatctttggggaagtaaagaggtctgctaacaatactttgttttagagtttacaccttatcgtcactggtagctgttagggacaaataaagttgagtttgtcctctgtggaaagacaccaatggaaatccttccaaacactttgcttgcatccttactctttggtacataggcttttaaggcctttctagagtatgttcccaggtttgtgatgatgctttggagtcaggaaagctgagtccagctcttccttggatacccatttctagagaaaggagtcttggtagcataaagaacaaccatgcaggttctgaagtcagcctgctgtattcagagtccatctctgcctcttctgtgacctcagacaaattgttacctcgtgcctttgaatgtaattttctcatttgcaaaattgggttataatatgtataaataatggtacattgtctcccatgttttattgaattagataatccatacacaaggattagctggagctagctgagcagtcagtgctcacagatgttagtgggtgcagtttttgtggagtagctgtcagatcccatcccgtcccatttcatttcatttttccaagatcaaatgaggaatagagacaggacttgaatctaagctttcttactcaatctagaattctgctgacacagagtactactggttagaaattacttattcactcatataggctgcatttttatatgacttgtttgcctttaataggacctgttttcctgaggaattacccaaaagaaaccccaattttccagatatttattactcacagaacactgtactaggcaattttcatatactatgaacttaacccttatagtaactttagaatttatttacttttatttacagataagggccctgaagttcagagaagcaacatagaattgggattccaagccaaactcatctatccccaaaccctatgctttgcactacttctcagggatggcatttagggtattttccttcaggtttagcaatgtgatggttgtcttcctgtgagatagcctagaggatgtgatcactgtaccttctgcacccctcaggtgttcaagcagccctggccagggatcatgcgcacaatttatgggaaccacacacgttttgagaccacgtactttaagaagttccctggctactatgtgacaggagatggtgagccttggctatcctgcccccattcctctctccaaaacacataccttcatttccattttcagaagagttgactagggatgaagagtagagaaagaaatatgccctgatgtctgtccctggtatccaggagagctatagtaaggctgtaagagcaggaatgagggctcaggacacttgttgagtggttaggagtactggctgctcctctagaggaccttagtttggtttccagcacccatgacaggtggcttacaaccacctgtaactccagctccataggatccaatgtcctctctgtccttggtagacacccccacacaagtggacacactcaaacacacacatacataaataatatatatacatatatgtaaataataaagaataattttttaaaaagtgcaagaatgagtgctgcaggaagagtctcagcatggtgccatctgagatcagattctggggatgacaggctcttattttttactctagtgttgacagaggtggggcatgtagaaatgggtattactatgatatgttcggcctcatgtctggagcctatttgtccattgtctgtctaccagttcatccatccatcagtattgagtgcctactatgaccgggcactgatctaatgaatacatggtatattactgtgaataacattgtcaaattctcttatcttatggggctcacattttagtaaggaggggacagacaataaaccaaatttattggttacaggttagtcataggtagagataagtgctatgaagaaaacaatgagatagtgcctccaagggtggtcagagaaggcttgtcctagtgatacttgaacagaggcctgagggttgaaaggggatatagcaggaagaaatctacagtaagagtattgtaaagagtggattcaaggcaggcattggtggcacatgcctttaatcccagcactggggaggcagaggcaggtggatctttgtgagttccaggtcagtctggtctacagagctatacaaagaaaccctgtgtcaaaaaaccaagagtggatacaagcttgaaattcacaaggaatggactgaagcctgtgaagctggagtgaaatacctagggaagaatgtcttattaagttggaagacaggttaggtaatagacaatactgtcatgttgacagggtaagcaacctagatttgattcaaagtacagttgaagagctgagatatggctcagttggtagagtacttgcctaagcatgcacagaattctggtttctgttcccagcaccacattaaactgggcacaatgcaatcttagcactttggaggcagaagcagaattaggattcagggccaactttgatacatagtgaatttgaggcctgcctggggtgcataagaccctgcctgaaaggggatgggagaatggagatatagctcagtatgcctagcgtacctgaagtcttaggcttagtcctcagtaaaacacacacacacacacacacacacacacacacacacacacacacacacacaccacacgattggggggggcagctaattagtatctggaaaataagtttgaatgttctaaaaatatatttgagattaggtagattatttattgtcatggaacaaattatgcccaaagttggcagcttcaaataacacatttcacctactttcttgaggatcaggatcagggagtgtcttggatgggtggttctcagtcagggtgtctcaggggttagaatcaagctgttagtgggggctgtagtcattgaaaagcttgactgagcctagagggtctgtttacatgctggtttacatggatttaggcagtaatccttcggcaactgtaagccacttaacatgggtgctggaaacatggttgcatgggtccttagttctcaggaaaaacagcaaatttaggcaggatctctccatagggaaactcacatggcatctggatacacctacaaatgatctaagagaatatgaccaagatggaacctaaaatgtcttcagtaagctaatctcagaagtgacatctatcatttctgccaaattctgctgatcacgtagattaatgaatggtatataatgagaaagaaggttgtagggctttaaatactaggagatggagatcagcagggccatcttggaggctggttgccaagccaaatgaaagtggaagcaggaaaatttgttaaaagattaccataactggtctaaagagctagttccaggacagcctccaaagccacagagaaactctgcttcgggggaaaaaaaaagattaccataactggtctaaagagctagttccaggacagcctccaaagccacagagaaactctgcttcgggggaaaaaaaaagattaccataagctactgtagtaggtgtggcagtttttatatcatgtaccctgctgtagggtctttactaggttgcatatttcttcccaggctgccggcgggatcaggatggctattactggatcactggcaggattgatgacatgctcaatgtatctggtgagagtcctgtatcccctcccatttcattagttctttcccccttgcaaatcctagcaaaaacttcaaagggagagcaaggactatcctactttgaaactgtggtgttgagtatggcattcagtcctgggcctaggatttggaggaaatgtataatgcacactaggatgctccaagagaggctctaagatggtcaagacatgcttggaggtgtgcatgtgaagaacgaaagccttccctatttgaccagattatgtcagccctgtgggtgcaatggagcaagaacaggggcaaggaagagctgagatccctctcatgcatttcccttctcttgacaaggacatcttctgagtacagcagaggtggaatcagcacttgtagaacatgaggctgttgcagaggcagctgtggtgggccaccctcatcctgtgaagggcgaatgcctctactgctttgtcactctgtgtgatggccacaccttcagctccaccctcactgaagaactcaagaagcagagtaaggagctttctggggcaggaactgaagggcctgcaagttactggggagaggctgcagcaaactacagactccaggggtcctgtggggtgactggtgtcttcccttagtctttcttcactagtcttcacactgggataataatagccaagagctttagaaaaccttctttgtgtcaccactgggatcagtgctttaaatgctttatcccatttaattcctataattaccttcacgaaatagatcctgttgttactctagttctaaagatgaagaaacttcaggtgcagagaactgcttgctcaaggctatgctgccagaggtctgatttaaactctagcaggctgattctagagaaagagctccatggacatgtattaaaataaaacaaaggagtaaagagacaccatgttaaaagagattagggaacagtaaacttcagaatgactctaggcagaactttaatcagctggggaaacaaagtcatggctttagaaagtctggctaaaggcactgaagatatgtttgataatttgttggttacagttagagaaaagattggtcccattgccacaccagactatatccagaatgcacctggcttgcctaaaacacgctcaggtaagtgtggagtcctccaaggattgggacgggctaaagcccagtggtggcaggtgtgtggatgggagtcctttaaagaacgggatcagtaagcactgttaccaagtaatcagaggtgtatgggttaccaggcaaaatcatgaggcgagtactccggaagattgctcagaatgaccatgacctgggggacacgtctacagtggctgacccatccgtcatcaatcatctcttcagtcaccgctgcctgaccacccagtgatcacgattcttgtccaggatttccctgtgtgtggctctccaaacttctgcccatccaccctgcacgctgccccggagtacaagggccaatgctggtttacactttgtttgaaactagggagacagtttcctagactgccaggtagaagggacagggcacaggtcaacctcagactgatatgctcctggactacagagaggtctccaagcccagaacagatacttaacaccatgtcctcaaccacagttagctagtcagagtgtaaatgagggccgagacagaagcagggcagtagctctaaccctttcagctttctaaagagcaccagttcttatcttggtcaaacccaagcctttcgaaatgacagcttgtgagtctatgaatgattattttttaaaattctttattgcttctgttctgagtctgaattctttgccagatggtagcacttgtctgttcatttgctagaaactgtgtgggtgggttcagtctccagagggttttcatatcatctgtctcattgaaagagtaagatatgctctgttcctagaaccaagggagttaacgttcctagtcctgccctatgaacagaaccctgcccacaaggggcactcttgagtgaaactttctttccttgtactttttgtgctcaagactaactggtgtaggaataaagttcatgagctcaagaagagagtcggctttctaaagtatctgtgtgttcactagctgctctgatgtgtgtagcagatgggaagaggactgctattccccagactgccccagaaaccttcatttgggcagaaccaggcaaagcttcgcccttaagcaagagcgatggaagccagcacaactatgacgtcacatcaggggtactccttcttgggaccctatcttgaccctataatcctctggaaacattagcaagtgactaagaattaggacttcagggtctgaaacccatgagacccccagagcaatcaagtcacctttcttgcatatccacctcccatgggctgccctcctccccttgatccatgaaacaatgaattgttgtatcatcattgttgctttatttagggcagagctggggaaagtctatgccctcctacccacttcttcctatcactcagtcctaccccaagtcaggcactagaacctgctggaaaggctcacaagagggtaataagatctgcagggcttatggcctttacctcaaagcagcttccttccccacactccaagatctggggatctccagaactcttctaatggaagcataactcttctggtcctcagatggaaggctgagagaaggtacccaggattttcccttccctgaagaccctggaggtctatggaaaagacaagttcccctaaggtggagacaggggtagccctcaggaattaggagaggaatgtcaagtacaggggatagaaggtctcttgagtgaagtgcaggatgtgccctcatacagggtaggggttgtccaggactgccactcctgcggccacacctccatctgcatgttcagtggctttggtccgaagcagatgccccacatgcttgttcatcacaagtgttgttccctgtctgtagaaatggggtcaggagacgtacaacattaggaaactaggcccttctctggtcccagctgactggcagattagaagtggctacattaagaaatgctaggactttagaatcagatttggagttgtatcctagcttggaaattattagcccttaagcttcctaaaaatgtccttaatttaaaattgagaaatacctcttatatttcaagatgatcatatggattaaataaagcaagaaaaaagcatatagcatgattcaggtgtacatttatgtcctgggctatacacttccgataactcaaggtgcctgatgacagaaggaatagtagtaaggagagtagcagtcagaatgctgcaagtggttagaaggggcatttgttgtaaggggaaggctgttgtggtagaaggcatggtagcatttgtgatgtctttaccttgccctgacctttgcaggaagttacattagggccttgttccttaccaattccaaagtcctcttttcttccttcctcttttgtcttttctttatttgaaatagggtctcgctatgtagccttggtggttcaggaactcaatggcctctaactcatagatatctgcatgtctctgcctcttaagttctgagacaaaaggtgtatactatcatgcctgctttcttcttgattcttagtattcaaatccaaattcagaagcccctcagtctttcaaagccactgaataccctcctctctctcacctttcatgggaattcccactggttttagagctggacccaaactttcatactctctggagtctcctattccttctgtccaaccatcatttctcaatcctcttggtggaatatggaatgtcctttacagttataaagcatgtctcttccaggatttacttgttagctctgtggaatgggtaagtcttgggtccttggccttacttaacagacaaagagacagttataaaactaggaactagcagagctgaaactgcagtccaggactcatggctctattcaagattcattctacactttcttggctggcactcttgtagggaagtagtagaaggagctgctcctgactagcttacctgacatagactccaaaaatacccagttctgagatacactggaccactcgggcagggctgccaggccgtagcaggcaattcccaaaaggctcaggttcaatcttctccatgaggatataggaggccctctcctcgctgtccttcagctgctccagagcttgcaccatttcctctccatacaggttattacctgcaattaaaatggccatcacacagcacacatctggcttctgagaaggaaaggtcatcttaacaagaaagctcttacacacgtgaacacacctgtcaccacactgttctgcctggtttgccccatctatggttcctcttaaatgtcggtattctctgggcctgggaagatggctcagtctgtaaagtgtttattgtgcaagcacaaagatctgagttctgatccccagaacccatgtaaagcaagcgtgggcacatgcatctgcacctctcccctctgctggggaagtgaaaggtgaaaggtgaaaggtaaagagagctggactcccacagctgctggctagctactagtctaacgagttggtgagttccaagttcagtgacagactactaaaaaaaaaggtggggagcaatagaggaagatatcaacccctgcatccacatgtatgcacgtatgtgaatatacatacacacatgtgaatacacatattcacacacaaagatgctaaggttctctaggaattctctacccctgctctgccctctatgtacttctgttcctaaggtttcatctacactgcatcactctcaaatctttaattcacactgtttgttctagaaatcagaagcatgtaccataggtctctactgcaaactcagcatatccaaatgaaaatctctttctgctagaacttgcttctcctgaatcttcctactcctaataaaatggaaggcttccctgagtcctatttaagttcactctccctgttacctatgttactatctcagaaatgtctccatctatgctcttgattgtcatagccctagctagcctgagcctctccatgggcctctcctgtgcctctcttcttgacaatggtatcagccttcttccatggtctctgtcacaaatatttcctctcattccaataaacttataaaggctgaagcactaagctttacaagttttcatcattgctaaacctacttggatcctggatagttcatgtgtcccttcccacttgaaactttaatggcttcctatctcagttatgataaaatacagtttatggcatatatttgtgtctatctgtgtactcacctatgcatatacatgtggaggcagacaccgatattgaggcatcttcttcaattgatataaaccttactttttgagacactaagcctggagcccagtttcagctagactgcctagccagtgagcctccaggatctgtcttcctttgccctccacccccaaagtcctagagggagagatgcctgccatcatgcttgtctttaaggtggaggtagggatccagtgcttgcatagtaaacactttattgactgagctacttccccaagcccaaatttcctgaaatattgtcagtgctctttataatcaggtccccaacagtcattcccagcccatattcctgccatctccaactcaagcctcatcaacctctagtccaatccatggtccactgcttttgcttaaatggtcttcagtttggaatgatcttaccccttttttacctggaaactcctacctatcccttaagacccaagtagaaaatcaagtctgtacgataaacatgatccctgccctcaaggagtttcacagtacacaggaatacagccaggtattcccttagaccttccagtatgcacccattctgtttctctatgatcttacaaactaaggttgtccaaattctccagtgttcatctaatcccctttactccacagggcttgcttccagggtgctgggagatatgctccattctgggatctgtgttgctttcttttgtaaccactaggcctgagactgtatccacatcaagtgccaataagcactggcaatagagtctttcactggacagctctacaaaggagatttacttacctccaccctctctctggggcttcagcacaaagtggttaggagcagcaagggcttcagcaatggcctggtccccttcttcaccctaataggaagcagaaagtagtcactagaattcaagctaatgaggcagctgaggtcctgctgatcatgcagagtggcatcagggagagggacagcagggaaaataattgtaaattcctttaggctagacactccaatctggatgtgaccgttaactccattgaagcactaaacatagaacaggccctttaagtcacttccctgggtttctatcgttatcacaatcattgctgaggaaatggatttaagctcccagattctggcctcaaggctcaagtgttgttcagagcaccaggatgtgagtcataatgccaactgtaatgccagctgccctgcatccttcccaacacactcaggtccaggtctcagctatgtggctatggtaggaaatacacactacataccatgtccaatgaatagaggccagcaaaggtggcacggaggcgggccacagcctcaggctgtcctgggagcagctcttccagcaggcccaccctgctcagttcctgctgcaccttcttggtcccagccagctgtgtggcaatgtccggacacttggcagcacatgatctctctagcagcagacgtgcttcccagttctgcagaggtaataagaccaaagggcctttactgaacaggtgccaggcactgtgccttttaatcttcaagctgactatcattacaacacccttgtgaggcagatatgacctcgaagtctgcagaattcttgcctttagcgaatttgtgaaagcaaactaatccaagttcacaattaaatgggaattactaacaaggaaatggctttggggaggagggacaaggtctcacagtgtagccttgtctggcctgaaacttcttgctacatagaacaggctggcctcagattcacagagatccacctgcctctgcctcctgagtcgtgagtgggattaaaggcgtgggccaccacatccagcagaaaatgcattttataagagaataggaaaatttgtgagcttttctccccacatccctctctctttcacccatcctattttgtgagacagagtctcacttggtagccaggctggcctgtaactccctaggtagcctgagcggtccttctgcctcagccttcagaatgctagatttgtcacttttttaacaggatctgattatggaacccaggctggcctgggactttctgagtgctgggattataaacacgtgccaccacacctggctggataaggtttgaagggcacgggacacttgattataagcttagcttcttattgtgctccaaataaaatccaacacttaaaaagctggttaaccatataacctttagtggccttttatccactaaagcccattccttaccatgatctacaagatcctgtgagaccgagttcccactggtttttcatctcatgctgctgcttccagctactcccctaactactgactcccatattctagccaaacaagtctgcaattatcaaatttcattccttcttcagggccttttatgtacccttttcttttgcccaaaattctctgctttttggctttttccatagatagttacatccttctcatcctcaagcctcggtttagttacttttcccctgaccattatacttaatgtggggttccccacaaccctctatcttttcatcctgttctttaggtcaaagccaattacctctcaactagggatcccccccaagctgggtatagtattacatatttgatttgtaaggctaacagagtatagtattacatagttgtaatgctaacactcaggtgattcagtagggtcttgagcacatagcagctcagttacaataatgagttccagggctatagaatatgagtctgtctcaataaacatagcaaaaccaaaactcaaaacatcatctgtctgttgcttttctttccggtgctcatctctctgacccggctgtgtagtcaccagaggaaccagacccgtggtgtctaccttgttttctattatttccccgcagcaaagcagtttctgacacttcacagtactcagtgtctgttattgttactcaatgaagtgcaatttgagtaattccctgacaataggcagtctgacaggtgaaactcactggagagtgggtcctcgggcaaacaggatcatgtgaacaaaggcctgcagctggctaatcacaggttgaatagtcctgttgtattaggagcttagaatacaagatacagggaaacatcagaggatcatgcctcggagctctggtccccatcctcaggcactgggtagaaaattgcccttgtcaagattacagacacctgtccagattacagatacctgtccacagctggatcaaggctgaagcctaaaatcccaaccacccacccagggctgtccataggagtagctttacctgatcctcaccagtcatctaactcctggcctgctgttttggtcagagtcatagaagcccataacagaagactagaaaaacatctcacagaagcacagaaagcaaaagttaaacccaagcatcatctaacaagtcacaaaagccttgtagctctatgtccatgttctaagggtaaacaaacttttctacacataccacttcctttcctttgttagcacaccctctcctcttctgcctctgtcctgaatcttggatccatttctcttctctagccagcaagttttcagtactctaaccacttctctggtcaaaaggacggtctctaaatctgtcctttagctgagctgtctcctgtagagctcagtccgcaggaactctaagtgaactataaatctcattttcaagtgtagcttgagatgtagctttgagaagctgagagtcgggcgggggtgggaaagctactcatagccatgactctcagatcacccatagtatttcatagcttctgttcagcattttaaaaagatttatttttaccttataaactttagagtgttttctgtatacacgtatgtgtactgtgtgtgcctggctcctgtagaggccaggtgctgggtctcctggaactggagttacagatggttataaactgccatatggttgagaaccaaacctgggtcctctacaaaagcagcccagtgctcctaactgctaaatctctccccagcccttatttctttttttaaatccaggaaagcagggatgttcagcctttcctccatgatatagatgccaacagtgggagagaagaatagcatattcagaatgtaatggtctgaatcagaaatcctggaaaattcttgtgggattttagacaagcctctgcatggctccaaaccttagtttcctcatctgtgtaatggggataataacaagtctcataggatggctgtaagaattaaataaaatgtatagaaagccaattttgaagctacttggtagttagcagatgaggtaatatcaaggttgtcactggctccgtattggtaatttcccactttagccacgagcatacctgagaacatgataaaacaaagagaccacagaaaaacctttctgagggctggagagatgactcagcagttaagagcactggctgctcttccagagaacctgtgttcaattcccagcaccaacatggcagctcacaactgtctgtaactcaagttccagaggaggtagcgccttcatacagatttacatgcaggcaaaacaccatcacacatgaaataaataaaaactttaaaaatatacttttattttattttatttttaaaaagcttcctgttcagataaatgagaattaaggaaaataaacatggtcagggaagctgggcatgacgacttacacctgtactgtcagcatctggtggctgataaaggagactgccattcatttgaggctacagagtttcaggtcagcctgggctacaaagggagagtttgctcctccctaccggaagaaaaagccacagaaaagaacaaattaaggtgggtgggtgggtggcctggaactcagctagtgagggctgactgtacccatctcttcctagatctttgctcagagttgttaaattgggtagctcaaaattacactatggaagtcagcagtttgtttgccaacttatctccaaaaaatgtgtgaatggctaaaacactacagatagattcctgaagattcagaccctaaagaccttgtagagtgaaaactaacacaaagcctgtaagaagaaaggtgtttccagcagcagatcccccccccccaagaaagaagtgagtcatagttgtgacgcctgagctgggtttctgtggagctctggtaggtccctggagggagagaatggtctaatagaaaaatactaacctgtgaattatactgactgggcatgtagccatctcggaagtaaaccacagcaacttcctgaccatccctgaaacaaaggatgaaaaaaagcttcggtatgaaattattactgatgtgctcaggggttcagtctatttcaggatacatcagagtacatgtggcagcccacaaggtaagcctgggaaaggaggggtttactagaattagtgcaagcagaaacctagtacttctattaaaaaccggtgtgcagcacacagtgctttagaatattctagagggaaacaagaaggttagcataggtaaaattaaaaacacacatatccaaaattttgggacatgcagaaactttaattaaaataagttcttccccgttcccttgatctattttatattatctagtttatctaataagtaaactagatactttgttttgttatgataacagcatattttgaaatatctaaagtgggattgtgaaagtccatggaggctcttaactttcttgttgctttgttttttgaggcagggcctcttatatcccaggttgaccttgagttcaatttatacctgagaatgagccagagccccagatgttcctacttccacttctcaaatgctagaattataaatgtgtgtgtgctctcacgcctggctacattcttttgtttttacaccgactctcactatgtacttttctatgtacttggaactttctatgtaaaccaggctggcctagaattcagagatctgcctgcctcagtctccagagtgttgaaactaaaggcatgtgccaccatgaccagccctggctaggtctaactatgtaaattgcagtaccaccccaatatgttgtactaatgctacagtgtgttggcccatgggaaaagtaggacctggcttagaagacaaatccaggctacagaccagagagtggtaaccagatggattagaatgagtctgcagctctacccacccagcccaactgctcaggcctgtcgaccagccacaaagagaggcaagaagacttttagaacctaaggttatcttgaaggatgctgatgcactcatccaaaaggtcaacagttgtgatataacccattagaagcagagcatggctaggcattcctaaaatttcctgtaaggatgagatatttcagaaattaggagaaaggaaaacaagctatcatatttcccagaagaaaggttctttagtgacaggaggtatcaagagaggttcttaacccagctgtctagtggctccttggggatgcttacatgaacagccttcggttttggtctagagaacccctttcagagacatcttcaaattttcgccggattacatggatgttcctggaaaagagaggtgagaaatcagaggtaatgggtgtggtgttttgaatggccctccacttggggccacacctgaaggtctcttcctttacttgcctgtccagtagctcattctctatggcacgctggtcaaatatgttcctttctttctcttgagcgatcagtagcaccacagcactagagaaagagcacaagtgagaaggggctgctacagagcttatccttcctgccgctcccttaaagtgaggtaggagcatggtttctcagtagtcctgctgatgcaggctgcaaccccagctcttggggcggggtgggggcaaaaagatcgtgaatttgaggccagtctgggctacatagcaagaccctgtgtcaaaacagaaaggagggactgaggaggtgactcagtcaggaaaatgcttgtcatgcaagcataaggacctgagtttgacctccagaacccacttaaaaaaaaaaaaaaaacaaaaacaaaaacaaaaagatgaagcatgtctgtcatgccatcactggggaagccgagacagggggaaatctggggcttgctggcaacctagtcttggcaaattgatgagctgcaagtttaatgagaaactctgtctcaaaaccaagatgaagagagactgaagaacacactacacattgacctggcctccacatgcatgtacacacaagacaagcagatagacagacagacagagacagaatatagcttctttgcaagaacagatgatgcctcaagttaggattgccaggggcaacaacacatttctttaaaacaggaaatttggaggtgaaaaagggagcctctcttgtctgttctctatggaagaaatattgtaatgatgtcaaatatctgtacaacttaaaattgagatttaaaaccatctaaccaaccgggcgttggtggtgcacgcctttaatcccggcactcgggaggtagaagcaggcggatctctgtgaattccagactaccctggtctacaagagctagttccaggacagcctccaaagccacagagaaaccctgcccccgcccccccaaaaaaccaacctcacccattttttccctagaagacatcttgagccatatatgatggcacactcttgtgatcccagcactcaggtagtgaagacaagagaattaggagtttaagactgacctgggccagtggtggcacatggctttaatcccaacacttgggaggcaaaggcaggcagagttcaaggcaggcagagttcaagaccagcctgaactgcaaagtgagttccaggacaactacggtacaacaacacagcaaaaaaaactaaaacctattttgaaaacaaaaacaaacaaaacaagactggcctgggctacacgaaaccgtatcttaaaacaaacaacagaaaccctagcacagtgatacagtaattcaaaaatctgtctgggagaataaacaccaagaatgttttgtaaatcaactcagattctaatgactgcattatcagacagtaaaaggatctgatccaagaggggagttcttagatgaaaaaacaaaagagctaaatggaactctccagagccaactacaaacaagccatcgtctctggggaccactcagccagcctgtgatgttcacagggccacatctggtctcacagtattaacaggatcactaaggctcactaggccttcctgctcctctctgtttacccacaagttccctaaagaagcaggggcttgcactttggcttactattctaagtatatattctgacctccttcgttgattggcctcttaatctacctgggcttttttttcaaccttagctgagcctcttagtctaaactgtgttcacctgacttctttctacttggctaaagtctcttccagcctgcctcaagtcaagaggacagacgggacattttagctgaaaactgactttaagctgggacctgcaagacaaagtggaagtggtttttcagaagccatcttgccttgagaggcccaagggcttgctcttcattttgtaccctgaaccactcggctcatgggtgtttggggtggttgggcaggatggcatcccgcccaggatggctcacctccaagaagaggtgaaggaggaagcctgaaggctggaggttaaaatggaatttcagactctggctaattaagtcagcttttccacttgccaaaccttgggagccagactcagaaaacacattctacctcctactgccttcagctctgagaaatttggactttgtagttgtcagttgaggaaggtgaactggaaatagcatgctggctgggagagaggacccaacactcttagtcggggctctgccagtgacttgtggtgtccttgagcaggtcagtcagcttctttccctgagccttaactgtctcatctatgaagtagatgtgttaatcagatcatatgtcccgatcttttaatatcaataatcatccttcttctactcattcaaactataggccctgtattttactgttgttgtcttaaagacttagttttatttgtgcatgcatgactgtgttgttgtatgccacgtagagctagagattcagatggttgtaatagaccctatgtgggtgctgggagtcaaactcaagtcctctggaagatcaagaatcacttttagcctcagagcatctctccagccctaggccctatgttttgaaaatatttgtttaaatgaaatcataattttacagacggttgtgagccacccatatgggaatataagccaggtccattgcaagcgcaataaatgctcttaacttctgaactaactctccagccccactgaaatcataattttataatcaggactggtggcacatggatgtagcttcctacttgggaggttagagcagaaggattgtcatgagttcaagaccaacgtaggctacataacaagacctgtctccaaaaagcaaacaagactggggatgtagctgagtggtggagtactctcctggcacacacaaggccctagatttgattctcagaatgacaaaaatagtttttttttttaaataaaacaaaattttaatcctcagattttttttctaaaaactttttattttttttgaggcagagtcttgctatatattcctggtaagacactgactatataacttagactagctttgaactaaaaggccagcctcctaactcagcttcctgagtactggatttacaggtgggttttttgtttgttttgtttttgtgaaaggatcttgatatatagagttggctggcctggaacttgctatgtagaccaagctggccttgaactcatagagacccacctgcctttgccttctgagtgctaagattaaaggcatctatcaccatggctagctcaagaaaaaaaaaatctcagagacaaaaaagaagtgccaaggtcacacgcttgctcagcagacgagcctcagccactctcacactgggtaaagccagtacctgctcaggagccacagtgcccttacccaccagtgcctacctctggacacatcagtgttttctccccaaattactcctaacctggcaagagactccctctgcagtgcttgtcattggcagtttctcaagtgatgtcactttcttaaaacggaacctggcagagggttctactggacatactgtttgtccaacttagggacagaacttgaggcttcttggaacttggtgaggcttagcaagcctaggaaggcttgcttggaggcaacagtgctattatacatgcaggttccaggagcttatcactgggttctactaccatctcaccatctgacttcaagcaagtcactgcacctctctgaacctcagtttcctgatctgtaagacaggaaagaggaacagcaccacctcagagcactcattctgagagctcagtgagagcctgcctggatgtgaacacttagtacaggtggactgtgctcacactgcgcagttgctagcagtggcctctcaactatctggaagtcacttacctagcatcttcacacatctggaacatggttgagaaataggaagaaagcaaagaaaacacttctaagcagttaaaatggacaccataaaattcccagatcaaaactgacatcacaaagaggtcctcatgctttttacacatgattagaacaacctggatccctgtttttccccaagccacagcaaattgggaggcagagggagagcagcagaggattcctattgcaagcacactgacggcagtaactgtaaaagtggatgttgaagaagccaacattacagataatgtatgggaactgaaagccagaggcacgggtgctttctgaccctcggtggcaccagtgcattgcaataagatgtgatcactgttatcacaatgaccctcacgccacaaggaaacagtaagttacgattagcctctctctagaaggaaacccagaactccactaaaatatttttggcacttaaatgtgtaagtttctattcctagaaacatccctttgtccccttctgatgtctagcaagggagaagctgccccacccatgaatgctaaccactgctacctttccacattcttacttagctgagccatagagctcccaggctttggcgattcccagggccagtcccttgctgggattattggagaggatcttggcagcttctttggtctttttcaggacgttgagaacatgtctggtggaagaaagacagcttctcagtaattggatggaccagggtacccttctgccatgacctcacagacacatacacaaaggaatagccaagtgcttaaaggctccttaccaccgttcctgaagcatccaccatagctgggatgtacatgcccagaggagtcctgagcccccatgtggccactccacccaactcagtttctaagggagcaggagcccttcaggtgctatatggaatcctgccgcagaccatatggaattgtaatgacctgaagcatcctgatggctaggaaaccactactgtggcccagctctcagacagaagcttctgaacgccctctgctttgggttaagaactgctcccaggcctcagatatgtcaggaccctcctatcagaggcctctggaaggctcactctgagcctggagtgttactttgcacagtgaggggcaggaccaatatgctatgaggtctcttctttctcggcatataaaagacctgatttcaagcagaaaactgctatgaggagaagatgcaggtgtggagaaaccaagactcaggaaggtacagtcacagaaggagatccttggcttaatcagtgactataggtccattgaactcttcccctaggaacccaccggtgcacagcaggagtccgggaggccaggcccccaaagctggcagagatagtgttgatttcaatctgtttcagggctttggagccatctgcgctgcactggaacatgtaatctgagcgattcaggcccaggaacacagtctgtggagaaaactgaaggctgaggacactggcccaggggctgactctggaggtctagccatactgcactctgcagagctaaggagaaccaccgaatacccccaacccagaaggaccattctgtcagcctcgaactgctctctggatggaggcccagtagagactagtccaggcatagtagattcctatgagaacagactgaggccacttctagtaaaaacaaaataccacagataagagagacaaggtccaggcaaaggaagggctaggaatggttacctgggcaatgccctctttcaggacttgcttgtagatatcaaagagacgggcagtgtagtcgtcctttttgatagtgctagagaagaaagaacattttctaggataaaagagacccttgaaaccccaggtcccatccctacccacccacttctagatagctttctaggtcttgaatacccattccaatcaagcagattattagtatctaataatctactctagagccagatgacctgggttcaaatccaagctctactagctactgtgtggtaatctcagggaatcccatcccctctctggttcttggtttgttcaactatgaagagaagaggaaaataactgcttataaaataggcttgtgaggaaaagtaaatgatgcagtatagttttgggttttgttttgttttgttttgtttttgtttttcgagacagggtttctagactgtcctggaactagctctgtagacctagtctggtcttgaactcacagagatctgactgcctctgcctctggagtgttgggattaaaggcgtgcgccaccactgcctggctacagtatagttttgaaaaattcaaacatcttgaataactgaaggctggtaagttttctgactgacatcaagttaactcttctccatagcttcccctgcattctagtcactgcccaggtaagtctctcctcctccatgacagtccccagggcagtttgctatgtacctgcaggtttttcaggcccaaggtttactgcatcagttaatccatgtgtgatatcatttccttggagaagcctcactatccaaaccagatcccttttcttttctttcttttttattatgtatgcagtgttctgtctacatatatcccagccggtcagaagagggcaccagatctcattacagatgtttgtgagtcaccatgtgggtgctgggaattgaactcaggacctctggaagagcagccagtgctcttaacctctgagccatctctccaatcccagatcccttttctaggtgctcccacagcactgtgaacatctcctttacagagctgactagagatgcaattctactttattatatggcaactaatatcatctctcccactgggctaaagacctcatgaaagtggggctaggtctaagtggactcatcagcttagcccagtgtgctgctgtggcgagtgctaggggctcatcctgtatggatttctggagccttaagaagaccaagagcagtatacagtcactaacaccacattgttgctcctaaagatttagggcaaccttgtcctcagccaagccaggcttgtaggctgatctagttatagaagtttgtggtggagccatttgtagtaggaaggtagctgtcttgaaggctgtctagaggatgacttctttcactggagcctttcttagctcttggtgagaagagtcccccagctgggctttagccacctagagaagtaggatacattttctcttctctgaagaggagatgcctttcaaccccaggctttaggctgttgttttcccttaggggctagctgtgatggtgtgtgtgtgtgtgtgtgtgtgttggtggcagggctcccacataatcacattgtcaagtgtaaatgcgctaaaccaggctgctcgtagtgagcataaagcaagccggtccagagaaagaaggtagtaacagggttcacatattcatgacctactagattgttggctccaaggcaatggttttcagacttaatatgattattatcccttctcagccgggtgttggtggtgcacacctttaatcccagcactcaggaggcagaggcaggtggatctctgtgagttcgaggccagcctggtctccagagtgagtgccaggataggctccaaagctacacagagaaaccctgtctcgaaaaacaaaaaaaaacaacaacaacaaaaaagagattattatcccttctcacattcaacctgttaccaaagagcacatcggagaaggatttggtctctaacaaaagaatctagttttccattgaaaatttaatcatagatacacaattatacacataaagtacatatataaaacattatatatatttaattctaaaataagcaatttatacttaattacaaaattaaccaagaaatttcacttgcatcaggacctgaagtgggaagaaaaagatctatcgggaagagacaaaggagtgactacctacttgcatcttgagtatggtttagtctgcattttgtcctacccaaagatatgaaactttaggtgacaagaaaaggtcattaaaaacattaaacacatccttctaatggagggattaaaaagaagggcctttgtttagaagttggacatctgactttaaaaacctccctggttttctccccaaacctggccattttccataattccaaatggagaccttttaaaggcgttattttattttatgtgtatgaatgcttcacctgtgtgtatataactatacttcatctagtgcccatggaggccagaagtgggtgttagatccccggaactaaacttatggaagactgtgacccaccaccatgtgggtgctgggaactgaaccccgatcatctgctgcagcaggacgtattcttaaccactgtgccatctccagccctcctgccccgatgacttttgtcatgggaagcaggggtcaccgatcacagaatcacagcaaccctaggtctcagccaacctcatgttgtcgactaagaaactgaggctttgagaagaactttccttttgcttgtcatacaaagagcagtggagccaggattagaaggtagctctcctcactccttttctacttttttttcctctctggggtacctgctccccactccaccaagtgagctaacacagcaacaactcgtagctccccaaccttcccatccaaagcttttagcttccctgaccccagaggccttagcacttagtacctagacagagtttgttccaggaaggccgagttctggctgacagcatccaccagcatgttgaaatccatctgcacagcataggcctgctccagcagagcactagggactggtgaggggaagagcgtgaacggggcataggtcaccacctgatcaatgagaatgtggggcagagagagagagagagagagagagagagaactgtgaatgggctatcttcttgcaaagtcaggcctatgcataactgagcacacaattgcagaacagcagttatttcaggaagggaagagatgagggaaaaaagcaagaaagggtacaaagacagtttccaggttctgttacaattctacaggattttctctaaatgagaggcaaaaacaaaataaaaacttccacaaaaactaagtacttactacatgcaaatcattgtgctgaatgcatacaatgggtcatcatataattctatgcagaaggtaactactgttatccatacttagcagacaaaggacttgagataggaattatgtaataggtctaaaatatattcactgctggtgtttggatttggaccaggatggttactaaaccactctaacacactcatactgcatgctcatccataccccactttcccctcctatgctcctgactgatatttaagccaagtccatccccacatcaggagttcacaccccaggcccctgaccttctggctggggtagagggaaaagcctgctggtagggctgctgaggtgaactgtggctccctgaatagaagccagtagtgacatgcccttgtcccagaaatgacaactcaggttaacaggttggcctttagttacactctgggttctttggactttacatggtcatgaaatcaaaataccatttaggacagttattcctaaaagggagaaacgccttctgagatttctaacaacaaatgaactggaacttgggagataattaatagatcataggaattgaattatttaccctctgagttaatatcaatttgccattgtggtagaaagggtttatggtggaagaagtttcattaatatacttactttaaaaactgccttgaactagataatacaaacaatcacacacaatttaaaagagttctaaatagctgggcagtggtggtacatgccttcaatcctagaactcaggaggcagaagcaggcagatcctgtgagttcaaggccagcttggtctacacagttagatccaggacagtcagggatatgtagagagaccctgtctcaaacaaacaaacaaacaaataataaaagagctaagggtacacagtgagaagtgtatcttagtcccactgtggcctgagtcatctagtcctcttcccaagacacaatgtatacttgtgtcagatatctttataactgatatatatgtttccaaatacatcatcccctttttacacatgcagaaagattctgcctcaaaaacacaggaacagggttattgcaggtcatgtaaaggtgacctaacacccaaaatgcatgtaagacaacaacaggttttaagactcaggactcgggagattgcctctccaaaaatttcccagaggttttctgccaagccttctgtctgtcctgaccccagaactcattgtaccttcttgaatttaggatgaacagcacatagttgttctctgctgtccacaggccaaaggctgaaacacacagtctctcactttttagagaaaaaaaaaatagcacacatatgacaataacactctgctttgttgccagggaaacaacaggaatggtgagatggtgaggataagcagttgcatcttagcccacaggctggcctcactagaggctagggtgagcttaaacctcttttaaaaattatatgactatttatttctgtgcgtgttttctatcgaatgccatgtgaagatcagaggacactttctgggaattgattctttccttctaccactaggttatggaatcaaattctggtcctaaagcttagtggcaaatgtctttacccactgagccatctagtggcccagtcttgaacttctattcctcctgattgcacttccccaatgttgggattacaggtatgtgctaccacagcctgccagtttgatttggatagtttagcggtgtaactttccattattattactaattattattatgttatttgcatgtgtgtgtggtgtatatacttgttagcgtgggagagcacatgtgtattcagagttgggtatcttttccttgactgatctccacctttatttttgaagacaaggtctctcactaaacctgaaactctgatttgccagaacaaacttcagagatctgcctgtcttccagccctggggttccaggtatctactactgtctcaggtgtggattctggaatctgaactcagtttctcatgcttgcttagcaggtatttcacataacaacccatctccccagcccctactggagagaagggttatgttttaatgttggctctgacttaaaaaaaaaaaaaaaatgtcgctgcggggctggagaaacagctcagaggtccttgcagaggacctcagttcaactcccaataccggcatggcagctcacaaccatctgaaacgacagttccaggggactgaagcctcttctgccctttgtaggtagtgcacacacattcacctgggcacacacacatacacataaaacaaaaataaatattacaaaataaaaatgctggtaaattaaaaaaaaaaggaagacacaaccctaacaaaaatttgatgaaggcttgcctctgagggaaacagtggctggagaagagaacctttctctacattgactgcttttgaacagtatgcctagctcatgtgtgacctattcaaaatgaactcactctggtccccgaatggagctggtctgctatgctgatctatgctgatctatgaagtgaaggtcacagtcctctctgcctagtatcaaaaagcctcttggctttctgactttgcctgacgtcacccactgacaagccctgcctggaacattttggcctctccctactttggaggccctgccatattattactttcccccatctgcttttaagctccaatttaactttcattctccattttgcctctaataaaaatgaactgctacttctaccaggcatcctgagagagacagtgaagtggggatatgcagagcatggcctcagcagccagaccctgccagtcttcccatgatttcagtgaccccagtcaagttacttaacttctctgagcttcgacttcttcctctctgttgcggtgcaggttaaatgagtcagcaatcccaaagtgttgagaataatgcctaccacacagtgagtcgtcaatagatgacagttgatgctgtactgagcacgggccacacctcctcctccaatgacattccctaattttattctctggtacattctccaactaaaccctgtgcttcaaaggttgagaacctctggctgactcacctaatcttccatgtcaaggctgtctggcatagagcagggtacaggttagaacagaatttattttaaatgatttatttttattttgtgtgcactggtgttttgctggcatgtatgtctgtgagagggtgtccaatcccctgcaactggagttggaagctgtagtgtgggtgctgggaactgaaccccagttggtgatcttaactgctgagctatctctccagcctcgtctttttctcttgattaggaatctcacttaggagggccagagagacagcttagtggataaaaacaaaaccaacaacaatacaactggatttagtactgcacatatgttatcctagcactcctaggatgagatggcaagcaaagacaggtgaactatttggaacccccaggcaagccagcctggaatacacagtacagcggcagaaaggtggaaggtgagaaccgattccaaaagttgtcctctgacccacacatgcatactatggcacatgggtgcctgcattcacacatatatacatacatacatacatacatacatacatacatacatacatacacacacacacaagctcttacgcacaataatagatttttaaataaagagagccgattcgggattccttctgtacatatgtttctcttatgggttgatgaataaaatgctgactggccagtagccaggcaggaagtataggtggggctaccagaccaggagaattctggctagaggttggagagacaggttgtgagggagaagccaagtagctgctgaaggagtatcatggtgaattacgggtaagccacagcctcgtggcaatacatagtttaatagaaatgggttaataattaagagaaagctagccaacaaaaagcctgagccattggccaaacagtttataattaatatgtttttgtgcgcttacttgggctaatcagctgtggggccaggcagaaaagaaactccgtcgacatctcactgagagtcagggaagttgatctaaaatctcaggacttggaggctgaggcaggagcattgccataagttccaggctccatttcaaaactatccccatttccccaaagaaagaagcctcattgaggactgtgccttttgtaggccccattaaaccccagaaagattaaatattaaacttttatacgatacccatttattaatagaagaaataaaaactcgaacaagaatacattccatcttgattccaacaattcataaacctaagttcctagaccatacaatactatttccaaaaccagagaccagcagggtggtggtggtacatgcctttactcccagcactcagcaggcagaggaaggctgttagttcaaggccagcctggtctacagagcgagttccaggacagctagggctattatgcagagaaactctgccttgaaaaacaacaacaacaacaaaaaccaaaccagaggccaaccttccacagtatcaggcagcagtcagtaatggccactctcaagtatttgagcttcagcaagtatacctgagtcttgacaatccaccaggcccacatctgagccacacagagacaacaacaacagcaaaagcatgtggctaggttaaagacaacaatgctggcacctcttcagtaaccagtgtgggtggtgttaacgtaaatggcagggagagagacagaaaggaagcaagaaaggaaggacggaaaagaaagaagcacaagacagaaaagctgatctgttacatgcctttacatacaaagagggagagagggctgggtgtggcggtatatgacagtaagcacagccactcagaggctgaggcaggagaatagagagtttgaggctggcatagactatacgtctcaaaacaaacaaaaaattggagtaataacaagtaaatacctagttatttacttgttactcatgaactacctggaaggataagcaagacactaagcacagactgcctttaggacaggggagttgggtagacaggggatgtggaacagagggttagccaactcttagaacttctgaatcttgacataggaaaatgttcttgaatgttaaattaattagttgcaaaataaactgatttctttttgctttgttttttaaattatttattttattttatgtgcattggtgtttttgcccacccgtgtatctgtaggagttgcaattatagactgtggtgagctgccatgtgggtgctgggaattgaacctgggtcctcaggaagagcaactagtggtcttaaccgctgagccatctctccaaccccagctttgttttgctttaaggatagtggtttttggtttgggtgtctattgttttgagataatatctcagtatgtgatcaaactgcttttaagtgatcctcctgcctgtgacaaggcccagctaaaggaggagatttttaagtttggttacagcgggttctctatatttacaagccagtcctagagaaacacatacagagctgcccaagcaaacatgcatgattccttgttgtgctatctgcaaatatagagctccctaaatagccattggtacagcaaagttaaactgtgattcatccacactgaaacactacaacagaatgaaattgtccctgagtagttatcttcatacatataaactaaaatgtgtcagtgtgcagcaagacctgatgacaagcagtgaaagttgggaacacggatgggactgtgtagagttctaccctgaaagtgtcagcagtttatagttgtaaggctaactgcaagtgtcacagaaaagttgtatattcaggacagacccaaaccaacagatcagtgcttcaaaaattgggaaagtgtggcgttaacacgagcacatttggcttatacataagtaagtgaacatgataatttgattgagttcttttggccacataacatgttaataataacaggaaatttggctatcttcataattatgataagtataataccaaatgataatgtatgggcaatagtaggtatctctaacaaagttatttctaaaaaatgatacactaagctgggtggtggtagtgcacacctttaatcccagcactcggaagcagagatgagtgaatctctgagtttcaggccagcctcctctacagagcaagttccaggacagtcagggatacacagaaaaaccctatctcaaacaaacaaaaaaaccaaaccaaaaccaaaacaacaacaaaaacaccctgctaaatttcttttaaagtatttgtagaatgaaggctgtaaggtaagagccaaccctgaatttaaacaaaactttgccttttgacttcattcatcagtttatttaatagactatttttaattataaaataaaatatgctagagccagcggtggtggtgcacacctttagtcccagtcagggggcagaggcaggagaatctctgagtttaaggccagcctggtctacagagtgagttccaggacagttagagctacactgagaaaccctgtctcaaaaaagccaaaaaaacaaaacaccaaattgctgcctgacaaaatgacatatttaatgtaccaatgagtgtttaatctttgcaccacagaacagatacattcaaataacattaagtgttactgcatatttataaatgtgacataattatggcattaggggaaagtatgactaagagcaaatagaataagcagctaagtgagaactaaaatttggcctttacttttaaacatttaatttcttataactcttgggaataaaaataaactgatattgtttttatcaaaaacatgcagaagggctggagagatggctcagcggttgagagcgctgactgttcttccagaggtcctgaattcaattcccagcaaccacatggtggctcacaaccaccttgaatgagatccagtgccctctgctggcatgcaggcagaagacagtatacataataaataaataaataaataaataaataaaatattaaaaaatattaaaaaaacatgcagaagactaatttcttagaaagagatttaagacagactgctaaacaaaaattaaaaatacatcatagaataatacatatggttcaacttggattttaaattacacatatatgtatattttatattttaaatgatacaaattacatatatatatatgcaaagaagctgaaggagtatataaagagtatataaagctaggcatggtgctgcatacttagcagggacaagcgggagggctgccatgagttcaaagccctcctgctctacacagtgagttttaggtcagttagggctccatgatgagattctgtttcaaaaacaaaacaaaaaagagcaattgcagagaagacaagtgattgggggtgcttgatacataatagttcccctgacaaagtgcttcctggaaattatctcctgattatcttatgccatcaattatataataatattctgttcacctattggaggaaagtacaactcacagaaatgaagtagctgcctaaattacacttcaaaccccagattttgattattccagcatgcttctttttactttacatacttttagaaatcaattttagctgttgaataaataaaggagagatgtggtctttggctcaaaggggctgcccccaccctgggagggcgggctctaagtggcattttgaagcttacttgagaggagctgggactctccgcaggcctcagcaccacgccctcagccaaggcccggtctatggcctgctgtgccaactcctcaagctgtttctcatcttgcaagatgctcccccagctggtggccatcccaacctgtgaagacaagagggcttggtgacagaaggcctagggctcagcagccattgaaaggtggctacatccatactgtgagacttgaccggttcccgtggaggggcaattgtggcagggaacatactgcttccacttcctccctgtacacaaaacaagttgacacagtatttccatggctattcatcctctctttgaattctcagtaacaatggcattattctcacagtgaggaagcaaaggttcagagaagagaaatgacttgctctaggcaatggcaggtctagctggtgtttaagtccaggtctctggacttcctgaccaaaactcctcaacggagacagaggcgctaacgccatatgtgactggtaacgctgtatgtgacaagtaacttcccctcccagaactacagattccctaagtgggaagggataaatgagtggtttccaaacctggcttaacattctgggttgagtgggaaaaaaatacttattactgggccccaccccagagattatgattgaaggggatcagtgagaggaaggggtggaaattgcattttaaaatgttttccttagatagaaaccattgtggcaaatcgttaatttcccttctttaaatctttctattaatttatttattagtgtgtgtgtgtgtgtgtatgttgccatggaacacttggtaaaggtcagacaacaatctgcaagtcagttcttgcttcccatcatgtgggtctctgggatcaaactgaggtcatcaaccttggtggcaaacacctttacctaatgagtcatctctcttggcgctaatttcctttcttattctgacaacctgcatcagtagatctcaaactacatagtggatagggaggaaactgtggagtatcatgaaatggagtcaaagaagtatcactgtgattggcttaataaagagctgaatgaccaatagccagacaggaattagcctagctgggacttctggggacagagaggtcttggagaagaagaaaggcagagtcgacagccagctgtggaagaaccaggatgggcaggacagagtaaaggtaactgagacacgtaaaagaatgtagattttaaaatatgggttaatttaagttataagagctagtggggcaagcctaagctaaggccacattttcacacacaaaaaataaatgtacagtttctcccttatacgaaccaggagccatttttttcttttaatttttatttaaattagaaacaatcttattttacataccaatcccagttccctctcgtcctcccatccccccactaatcaattcccatcccatccccccatcttctccttccccaccaatcccccatcccatcccacatccactcctcagggagggtaaggtctcccaaggggaataatcaaagtctgtctcccccatgtatctagggaaagagagtatcccttcacagggaatgggctcccaaagcccattcgtgcactagggataaatactggttccaccgccagaggccccatagactgcccaggccccgcaactgacacccatgttcagagggcctggttcggtgacagctgggtctgtgagctcccaattgcccaggtcagctgtttctgtgggtttccccagcatcaccagatctcattacagatggttttgagccaccatgtggttgttgggaattgaactcaggacctctggaagagctcttaacctctgagccatctctccagcccttaagccaggagccaatttactagcacaaaacaattacatctttctgtagacatttatcaccatagtttaaaagggacaaaaaatatttttaagaaatcacattattgttaatcccagcacttgggagacagaggcaggtaggtctctgtgagcccaaggccagcttgttctacagagtgagttccaggtaagagctacacagagaaaccctgtcttgaaaaacaaaaacaaaacaaggaaggaagggagggaaagggggagggagggagagggggaaggagggagagggggaggaagggaaagaaatcacattatcagggtagaaatacccgaaacccagctgcccagcctagtgaaggagaagtactctctctgccttgctgccagaggtactcagaagtataccagcttacccattcattttgcagcaggttttggggttcagaggatctggataaaaatctggaaacatctggtcactatttttgttctaccctgctgtcatttaattctaagaaacaaacatggctgctcaactcagtggttgtcaggaagagaattagaaaatgatagataacttccatcattttcagcctctgtctccttctcctcatggtgaccttgttatagaacatccatctaagtgggccagcctcagcacaatgctttgacagaatgatcatgtgatctcaacacggtccaaacaattggagacagctgtcagagtaaagaacaagacttggagtccgacagacttgggtgtaagcctataacctgacttcccacataagggcaccgtggactaaatgagaaaaattaatgatgttttagcatgttcagcttttagtagccagtcttctgtttgtatagggaaagacctgaatctggataactttataaagaggcttattatttgagcatgctggtacattgtctatggtcctgtgaaagcaggggcatttctgaaagttcaaagctagcctgagctacatactgagtgccaggccagccagggatatatagcaaggtactgtctcaaaaaatacttatttatttacacacagagatttgcctgcctttgcttccagagtgctgggattaaaggtgtggaccaccactgccaggcttaaaaaatatttcaagtaagttttattacttttttttctggtcaggattttgctatgtcattcaggctggcctccaactcagcaatccttcgatcacccaagcaatggcatcacaagaatgagccaccacacccagctgaagagttcactgactataagttctatgttttgaatgctgcagggcatggtgctggctttggtgaggactccctggccgacagcctttccatagttcgtaaatgagcaggaaggaaccaacagggtgactcaggatcactcattacaactcactcttctctcactcctcacaggggcagctccctaatgatctagggacaaaccacctggtctcacctcttaagggtcccaccacctcccaaagtcaccacactgggcaccaagcccaacacatgaacccatagcagagttctatacacaggaatatgtctttgctgtgttcacttcataagcagtgggagacttgttacaggtcatatagaaacctagtggcagagccagaataggaactcatggctccaacattacatcaactggacctccatttgagtctctacacactgagaaattccaaagctgtctgttgctgggctttgcttatctgacaacaatgctaatgcgaggctcttggctaggtgctagggacattaacaataattacttaggatgggatggtggcacaggcctgtaattccagcactcagaaggtaggggcaggaggaccatgagtttggggccagcctggcctacacagcaagaccctgtgtcagtaataataataacagagctgagcaacggctcagttggtaaagtgctggccacccaagaggacttgctccccagcacccataaaagatggccacagtagtgtggtactcttctgaaatcccactgccaaggaggttgtgacagctggacctctggaggttgccatcagtgagtgtgagtgaactccaggtttagtaagaccctgtctttagaaagttcggcagagggctggggaggtgactcagcaggtaaagaggctttccatgcaagcatgaggaccggagttcagatccccagaacccacacaaatgctgggcaggtgggggtggcctgtaatcccagaatttgaggggcagagacagagataaagtggagagtgatccaggcagacatatgatgttcgggtcccacatgtatgtatgtgcacatacaaatgcaccctcacatgcaaacactgagacacacatctgtacacacacacacacacacacacacacacacacacacaactgagggaaaacaaagtgttgactttgggcatccatgcatacacatgcacacaaacactacaatagtaacaacaactagaaaactgctaactgggtctcttgtttttctttctagagatttaacccttctgtgacttgtttgcctgatgacactttgtgtttttgtattttcaccgtaagtacttccttgattttcaaacagagcatttggctgctccctgggatgcttctcctctgacgaatctcaccttggcacccaagccctcccccccacccccgtgcacttttctcccacgtcccatctcttccagtcctgtggattctgctgactaaacgcagcgctttgaattcctctcgtctgcctccactgatctagacgagcactggccaaccctctcctcttccctgggcactaaatagattcagagtagttacaccagcctctctcccacttccagatcttggctgatgctggtttccctgtggctgaaaggctgtcccttctggaccagccccaactcccgatgtagttttggaagccatccctggacctctctgtccagccaggttcgtatctataccataaaaagagcatctgtcttgatacttctcagctagtactagatcatagtagtcagtgaaggttaaataagtagtgatgaatgaatcaccaagaactttaaaacgcccacacagaaatccggtcggactttaatcccaggggcgaggccagtggggacgcagggcctcgagctacgacagggtcgccggccttggcttgtccccatgatgggccccgttcactccccacccctgaacaaagtttggtcctgatctctcccggttgttgatggtggcttttaaaattttttctggaactctggctctcgcctctttgaccgcgtccgggctggaagcaggcgagctagaaatctaggttcagcacgcgccagcccaacccccgcactggacacaagtttccccggcgccggccgccgccccacccaccgcgcccgcccgcccggcnnnnnnnnnnnnnnnnnnnnnnngccgccgtcgccgagccccgacctactcgttcgttgtccagctgctcgccaagctcaaactcctctcgccgttacccaggctcagggggcggggccttggcaccaccctgtgcgcctgcgcagactgccccgctgggcataaagaggagggtggggaaggagcctcgcgtctgtgaagccggacggcggccgggaaggggcactccgtgagaagcgacctgggctttagggatatatccataccctggggtgtgacaggctttgggaagtagggaaggggtgtgactcatcggcgggggggggcctgtaggcttagatctcggagagtcagagcctcctgtgatttggggacactcagtgtagaatagggtgtcgggtctcctggcgaccgaaccgggtcctctgcaaaagcaacaagtacccttaactgccctctccccggccccgtggggctgtttttaaatatgcagcttcatgaccctcttacccctacacagacccctcatcctctggcaatccgcagccatttaactttcttattcctagataatgagaggtttgttaaaatctgaggcacctgatttaaaaaatgtgtctgaccaaaccctagggaattaattatgactaagataccaaactcctaactggtttggtgtaaataaaagatgagctctagagtgtggggcagactgttaagagcctggggactggagttttagcatggaaaagagagttttctttgttaggttccagcaggtgctggccagatttcaggtgtgagggccaggcaatgaggctgaggcaggccatggttgtggagctagagacaggggatgttaaattgaagagtcttaggagggagatttgttactgactgtaaatcagtggcccaacccagaggccagaatccttccaacttcctagataaagcacatacatctctccctaggacagacagccttccagacttgtgtataaactcaagagaattggcagataggtggtctggtaattgccaaaagagtgtttgctgtctgaaccgttttccttgtcactattgtgcctgaccaggtaggaagcagcagccccagtagccggtgaaggtaaccatttctaaagcataatgaaattacaataagcagggggtcttgggcttgagcctttaatcccagctctcgggaggctgaggcaggagaatctcaatgagttctagctcaacctagtttacataataacagttccagaccagccaaagttagttggtatgcccttgtctcaaaaccaaaacaaacaaaaaatgaattataataaaaactaaagcaccatgacccatggctcactgtacaggtgcctctctaagatggaccagcaatgatatacctattgattacgggtgaaatatgggcaggatcctagatcttaacagccctttggctgagtctcctcacattgtggcttcatttccattttgtagatggcagctgagcctgagaagttacctaactgttcaaagtggtgtatagtgagaatgggaatgaagagccgaaggcttagcccttcctactcctctgcgatttactgtcattcagatgtttgcccccttggatgccaccccactttgtcactctgtctcagagcagctattagcacctgagattacttctctttgtttgttgtttccatcctgtgggtgtgaattccatcagcatggccattatctgtcttgttcactaccccctggaagggaaaaacaagcaacttcaacagtaaagcaggtttagcctgagaaaatatcaaaaccttcaaaagggagatctcttacagcaatgattctaacctgtgagtctgagacctttggggatggaatgaccctttcacaggggtcacctaagtccatccgaatatcagatatttacattatgattcataacagtagcaaaatgacagttatgaagtaacaacaaacataattttatggttggggtcagcacaacatgaactgtactacagggttgaagcattaggaaggttgagaaccacttccctagaccctggaatggtgcctgaaatgatgatctaacaggatgggagagagggaggtggatactgagattagtgaaaactaagatacctcaggtgcttctcacaagttccaaggtaaacattatctccattaattggtttgtttaggtttgaggctgtagctcagttggtagaatgtttgctggtgtgcatgaagccctgggtttgataaccagctccacataaaccatgtgtgtggtggacatctgtaatcctaccatttggaaagtgggggcaggaagattggaagttcaagagtatcataggctacctttctcaaaaaacaacaacaaaccctattcatattcactggacaaagatgtcagtgtataccatgtggagaaatgaaaagatctaagatcatcaaatccagtatggaggattgggatgtattgtagtatcgtggtgtcaggctcagggtttgatccctagcatcccctcaaaaaggatttacaaggctcccacttagctccatcatgaacatgtctttaaaggctggtcacagtggtgtgtatctataactccagcaacttgggaggctgaagcagtaggatcatgaggccgtcctgggctgtacatagattgcatccccaaacagaaacccaggatgagggagttttcccagggtcttcctggccccatgcctttgctattgcatatagtaaacaccagagaacctagctgaagattctgcagagggcgataaggatgcaatgagccttggtatctaagatctgagttcaaatcccaactccacaacggagcactgtgactacagcaagccctgggtttaataacccaagccctgggtctctaaatcccacagcctgacttctaaagtggagtaatttttccttgtctaactgctctttattgcagtggtcacaagtgctaggagcttggctagttccttctcaccacaaggttaggagtccagtagtgttacggtctccatttgtacagcagggaagtggaggcatgaagaggtgtcctgctttgccagacttcacacagctctgcacacgtagccactggccctcttcctatgctttgggatgaggtcaggcttcccagagatgactgttgaatccgatgaagtctatgttgaagggcttgtgggaacatttgagtatgaattaggcagaagactgcctttaactttgtgctctgcatttgccctgtgagggcctctccaagtctcagttggctttatggagagggaggttgagacaaggtctcatgtaccttgttatggagctgaagatcttgaactcctgatcctcctgcctctacttcccaagtgttgggattataggcttgtgtcatcatcacaccacactgagctttggtctggccttttgattgagacacctcccattgtcccagggtctgcattgcacatggctgatgtctctctttagccatgacatcaccccttctggctctacagtttatgaggctatctatctctccacctggctgggggccactgcttcagctactcagagtggaattcctttgccttccagcctctagcacgggcctggcccagacttgctgctcaggaaatgcctgtggaatcaaagtgggactcttacatgtgttgaggattcactatgtgccaggcctatcctgacactttatatgtgctgtctcgtttacactcccgcagtaatcctgggagggagacattattgttcttattttactgagaagaaatagagaagctggactctgttgtaggcctacttgtcattgttgttaggcccaaaaccggttctaggcagtgcttctcaacctgagggtcatgactcttttgggggtcaaatgccactttcacaggagccaccaagaccatcagaaaacacagatatttacattaccatttataacagtagcaaaatgacagttatgaagtaacattgaaaatcatgttacggttggggctcagcacaatgtgaggagctgtgttaaggggcacagtgtcaagagattgagaaccgctgctcataaactggggaggctgccacttctatgccccaggaccctcagagaaatatcacaaattctggtctggctctaacttgatttacaagcaaataaaagtcccagaaaagtcagaagactaggctagtgagaaggctcctcaggatgtggcttttgtcactgggtctgaagatctgagttcaatccccaggactcacaaggtgcaaggaagaactgaatcccacaagttgtcctttcaatcccgtaagtgtgctgtgactcatgggtgtgcacaaacacaactaaatccatgtaaaagaataaccttataaccattctgaacatttcatatgaatggaatcctatcccgtgtgacctttgtgactttcccttggccagcatgatgtaatctggatcagagctttgctcctaggactggagagatgactcaagggttaagagcactggctgctcttgcagaagaccactgttcagttcccagatctcataaggcagctaactccacttgcagtgaaccccaaaccctcttctggctttatcaggcaccaggtaagtatatggtacacactcatatgtgcagacaacaggaaaaagaaaaactccatccctttgagttgaatactcaatttgtgaatataccattttgttcattagcttaaggcatttgagatgttttccctttgtaaacatttttttttcctcttaaaagagtctcattatgtagccttggccagcctggaattcacaatgtagactaagctggcctcaaattcacagaaatcagcctgcctctgcctctgcctctgcctctgaaattaaaggcgtgtgccaccctgcctagcctgttttcactttttgctattctaaatgttgctaacatccacatacatgtctgtgtgtgaacattacctcttagagtccactggagacgcccaggagtgaaattgctgagtcatgctacctacaagttaaatcctttaaggaattgccaactgttttccaaaatggcagtggtatatgagttctggtttttcatcttctctactacttgtctgtctgattgtagtcctctaaagtagggtgaaagatctcattgtgggtctcaggctggcctccaactcttacgttgttaaagctcctctgtggtctctgtttctgttcctgcctaggcttcccttgatggtggactgtgtgctggctagtctcatgtcaacttgacacaagctaggatcatctgaaaggagggaacctcaattaagaaattgcttccataagatctggctgaaggcaaacctgtagggcattttcttagctaataattgatgaaggagggaccaactgttttgtgtggtgctgaccctgggatggtgtcctaggtgctataagaaacaggtgaaccacaccatgagaagcaagccatggcctctgcatcagtcctgcctccaagttcctgctctgagttcctgcctcaatggactgtcacctataagtcaaagttgcttttagtcagtgtttaccccagtaacagagaagcaaactagaacaccaagtctcagaattgtccattgttagttattattatttcttctcatctactgcttgagaagtgacagttcactgtggcttcccagattaatacatatttttcattatacctgtgtggttagatgctgcttggagcctctgaagtaagaacactttctgtggctggagcttcagggctctgtgtctagactctgttggctgtgcagagggagactggaatagggaatgttaaggagggtgaggactatagggagagggctgttgtcaccttgagccctgtggtggaaggaagctaaagttccatctccttctaccctgtgttattaaaaaattaaaccaaacaaaggagccaaagtcttaatctgaagacctaaaacaatgaaactcttaagagaaaacccaggtgacactcatggggatcataagttcaccgatgctctcttagatacaatagtcaagaggggtatagaggcacatgccagtaaccacaacacccagggtcgcacaagaggattgcaactgtgaggtcagtctgggccacataacaaaaactaccctcatactaggcatggtgacacatgcctttaatcccagcactcaggaggcagaggcaggtagatctctgtgaccttgcacagagagaagtggccacagagaccacaaaaccaagaagatgcctatggcacccacagttgctggcatgacctttttcttctcatgacctctgtgatggtgagttgtggactttccttgcttgttctcctgaaatgagatggtagtaataagaaaagtaattagtggatacttattataagtggcgagttggcgttgtgtttgttctttttaaaggtgtgttatcttactcctgagggaacagctgctgtctcagaggcagggtaattggggtttacacacagacagcccgactccagtgctgtattgttagcctggctcaaaagaacaaaggaagatgagcaagcttggcaacaagtgtaataaattaaaaatttgggtgcatgccaggtgtggtaatgcacacctttaattccagaatttagaaacaagtttgagttccaggccagcctaggattaatagtaagaccttaaataaacaaaaggtcactaggaaaacctaaataagttggtaatatctcatgtcaatattgttacagggcaatccttccatgttttttttttggggggggggttgttaggatctcacactgtagcccaggctggcctgaaattcactatgttgcccatgatggcctcaaactcttgcctcagtgtcctaggtgctaggattacagacatgagcaaccacaattagaattctgtatttttttttctgagacagggtttctctgtggctttggaggctgtctggaactagctcttgtagaccaggctggtctcgaactcacagagatctgcctgcctctgcctcccgagtgctgggattaaaggtatgtgccaccaccacccggcttatatgtaaatatacaaaattaaaataaaaatcaattaaaaatataatctgttcaggggtaaatggctaccacccacaaggccctggttcagtcctcagcactacaacactttttaaaaatagaaaaaaaaattcaagccataaaaattccaagggcttgagacctcctgtccttgagttgatgaagcccagcttcagaggtatggggctgtggtagggccactctctgggtactcagggatagggccgtggcgccatcagtcagctttcccagtttaatcttttgagagagtttctgctctcagctcccaaacctactgaccatgaccacagagcaagtaagtgcacagccaagccttttccatctcttccactccttcttggccttttactgaggatggtaaggtgttctttctccattctcactccaccagatggagctaagtctccattcctgggaagccccaggtggtttattaaccctctatcttgggtgtgtctgatgaccctgaggagtgagccaagtcccaggctggaggtgtcagccagtgactgatgtcttaaattaagtgggcagctgacccagtctggacccgttatcataatcccattacaaaaggcaaggcctgggctttggcacaggatttggtctgctgggaccctataagatccagggacttcagcccattccctatggagggacactattgtagctcagatacagcaaggagggcctaggccctcccccaaacgatgtgacagactttgaaggtccctggtgagggcctcattatccatggggaggagttggggcgtgggttgggggggttggtggggaacatgggaggatgggatggtgagggaatggggggcgatggatatgtaaatatgagtggtaattaaagaatttaaataaaaaaatacaactattaaaaaaaagatccagggacttccctctcacgtattgggccccttagaaccacttttgaaaaatgttgactgaccagggcatcatcttaaaattccatccctagagtggcagactcaagatttccctactacaaaaaccccaatttatccacagctggagccaaggtctcagccattcctgcccaggctctgcactgtgtttggcctgttctctcaacaatttacattgggttctctgtgtatatttattttgcagagaaggaacatgaggctcagaggtgaagcaacttgcttgtaagtgacagggcaaagatttgagggagggctaacttgttgtagagtaaccctggcagacattcagattaaaaagaagtattgggccgggcgttggtggcgcatgcctttaatcccagcactcaggaggcagaggcagaggatctctgtgagttcaagaccagcctggtctacaagagccagttccaggacagcctccaaagccacagcggaaaccctgtcttgaggaaaaaaaaaagtattggcagccaggtggtggtagtgcacacctttaatcccagtgctcaggaggcagaggctgaagcagatctctgtgagttcaaggacagcctggtctgcagggtgagttccaggacagctaaggctacacagagagaccctgtcttgaaaaaacaaagcaaaacaaaaagcagcattgccatctctgcaggagatgctgctgctgttggtgtactgtatactgtagaacagacacaggctcaggcctttgcatagattaattgaatacacataacaactccgtgcatataaagttataacttcttcataatggaaattggggctctaagagacccttgcaaggtcacatggaaagttagaaaatgactctcttctgccatttcttccccaaacctcctatcattggtttcctccctcctcctacactggctccccagcccctccctaatgctgtagctgagctgctcttccttgatctcaggtcctctggctgacccatgtccatagcccttcattcatattcttaccatgttttggagcctgatgttgggctaggctgtatggattagtgaaccctggagataattctacctctgggcatccttatcactttctgctgctggacaagaggagtgatggaggagcacatcactcaggccctctgaaatgtctgcatctttgtgagtagagcagtttagaggtaagagccagcaggatgtccatacctggcatggaggtcagatgcacagagtggggccaggattggcctctccaggctgcgtggttcccaggattggcctctcaagctggaagctgatatgagcagcagcaactgctggcattatctggcctctaagaatagcttgaggtaaagatcagaggctgtggccagggaaaaggacaggggcctctgtctccctgcccaacgctgctgcttggcatggaggctggagtcctccctctggctcactgtttgtctggggaggttttgaatggacacactcatccatctgtggactcccagaactcagacccaggttgtggctagagacagtgaacacacagtgcaggggctggtcctcacctagccatcctcccacattctaaggcctttattcacttagcaaacactttaaaacaggccttacatatgattaaaaatgcaaagggtattaaaaaggaaataaatcagtttctctccctgtccccacctactgcttccatcagtctcctgaggaactaatctacccccagataaactcatggacacacaagcctacctgacacacacagccctttctaaagtacattcttttttccagtactggggatggaacctagggcctgtgcatgctaagcagacgttctaccagcgagcatatccccagctcctctcacacttttcctaatgctctgtcttagtaacaaattgagtctccactagtaataagtgctagtcttagtgcttcagatgttccaattccacctttatgttcaggatctatgtcgtagctattctgctcactgttacaggcttaagtgacttctcaagatgttatggctggtaattgacagagacaggattcttcctcttaagtttgagtcatatccctatgatacaagccttctctcttcctaaaggccaaggtaagaaatgtgtagtgaacatttaccaagcacaaggctaattgggatacagtagagcataaaaaagacaggtctctgctctcttggatctggcaccccagcactcacaagtgcctgtcagcgaaggtggcagaaaggggaacccacatgtcctacatcgtgttcaaggctgctgttcagacatatccttgttcctttacccacgagtcctccagctccccagtcttggagccaagaacccttggagcttaagtgaaagttgaaatagggaagatggggtccagacagaggtagcagcctatgaggtcaccatggagccctggtgagcctcatctcattcctctgggatccacttcagcaggcctggtgggggtgtctataatccagggaccagccattgtttgaagttggggacaattgaagggcgagagagctatagatagatccacagctgctgtcacctgtcccagcctgggcctagggcccaggcattgtctacattgagggcctctgggggtgggtgatggaacaggcccagctgagccttagagagactgagtcaaagtccaggagggagaaatgctaagtctcagagggaaaaagaccaagtcccttgaaagatttaaggattcctacccagtgtccaaaacagccagattggtgttggggccagagagagaaagcatgctatggagatactgcggagctaaggcaaaggttgaacttacatatgagcagatcagaacccgagcagagctagtgatgggagctagagaccctcagcaccacacagatcttctgggacgcctgcacatgtacttttttatatctttttttacttgggcgactacatcccagagttgtttatggaacaatttgaaggatcttcatgaatgctctgagagtccccagggtctttagaagcttgaagatatgctgctgggtgatagcttcacaaagacctgtgtacccctttgtgcctcagtttctatgacttcaatgtgttcatttgtacaaccattaaagggtccttcattctctggtgctggcaggacattatccctgtttcagatgaggccacagtccctgtacttagtcctttatggggatgggggacagctggttgcccacttcctccccccagtaacctttcagacataaatccatgctaaggcatctctctctggataaacagccttgatgccttttggctgccctcatcctattttctgcttggagcatcagagctggggcccactcaagccctctgcacctgcccagggccccatgaggaggacaaacctgggacaagcaggggccaaccacccccagagtgccaggatggcgggcccctcttggggcctcaccaccttgcctgtggaccattatggcagcctcctcctgagtgagccttcctgccaccggtgggtctcgccccttcaatccgtcctccacaccagctgccacagggatctgatgaacacataaatctggctgcactgtcagatctccttgctcagggctctttgatgaagaaataaataaaaacgcctttgatggtgccccagctcacacaggggaaagctctaaatcctgctcttgcttttgaagttcttcacagccctagcccaatgaccaggtccagccttgccccgcgttatgccctgaggcctagcctcagtcatgcagttgctcaggacggatcttcattctcttccctccagcactgtgggctcaggacacctgtctcatcgtctcttccctgcctttagcaccttggcccatctgcttctacctgggtgacctcagcaaactcaactgttccccgatgcagctcttaaccctcccagtctattctcaatgtggcagccagaatggccactcttaaactttaggccatccttgccctaaaaggttcctattgttcttgcaatcaagtgtgtgtcccaagtgttttgagattctgaacaatcttgcctattttctaccccctgttattcactagtaaaactcttctcctaaaacatatactttttaaaaaccacactcagtcttgtggggtataccgggggcagagacaatttggagctaggttctaaaatcctggagtctagtctcctgaagctggaccagacttcagccattgcccactccaaagcattgaaccctctgtagctactacaggcacactttcttccgaggctggctcttcagtcacaggctgactctgagtttgtttgtttgctttaattttatgtgtattggtgttttgcctttatgtatttctatgtgaagatgccaggtatcctggaactggagttacagaccattgtgaactgccatgtgggtgctgggaattgaaccagcatcttctggaagagcagccagtgctcttaaccactgaaccatctctccagccctggctctgagcttcagaacccacctgtgtatacaactttgcttcctgtcattgtcttgcccactggtctactttccccatctctctccccatcccagactttccagagaaatgttctaccatgaagtcatggctccaatcactgcagattcgcctttgaggctgcccaagtcccataaactccctttgctcctgacagcatagacatatttgaaattatcacctcaagcccttgcaaattgcaggcttccttgaatctctcagaacatgggttctttgttgctttgctattctgacctggatactcaaccttagcaggaagatgtgccccgagtggtggaagtgaacctagcaggacatttctaggcctgtattctaggtttgtttctaagcaattgaatgtacattgggcagtaagtctagaattttacccacattgtatctttgcatagactacaattatcgtaaagttctgattttttaaaagttaattttgttactcctgggcaaaaagccctgcatgctgagtacctttgagcagtgaaaagttgtatctactctctatactgtgtgtgtatgtgagtgtgtgagcaagtgtgtgagtgtgtgtgtatgtgtgtgagtgtatgagtgagagtgtatgtatgtgtgagtatatgtgagtgtatgtgtttgtgagagagtgtgtgagagtatgtgtgtttgagtgtatgtgtgtgagaaagtgtgtgtgagagagagtgtgtgtgtgtgtatgtgtgagagtgtgaatgtgtgtgagtgtgtgtgtgtgtgtgtgtgtgggtgtgtgtgtgtgtgtgtgagtgcacccacccatccatgtgggtgcaggacatcaggtctcctgcttcattacttgtgaccttactcttttgaggcagggtctctcactgaacctgcagatggccagcaagccccagctatcttcctgtttcctccccacagtgccagggtgacagatgtgcacttggccatgcccagttttgtgcccatcacaaacccatccctttacagggatgctgggatctgaactcagatcctcagactggagcagcaagtgctcttacccactgaactatctgtctgttccctactctccacacttctacaagttgctccaactcggctcccagcttctgaccttgtgcagatatgaaaactctatcacctaaactatcacgtttaattcatttgcctggtagctatctactgaattctgtactggacaggcattctgaaaggtgctgggaatgcagaccagactcctgtccccagagtttttagtggtgggaggcaaccaacctccacaaagagtgaaaatgaccttattctcacacacatgtctagaggatgaaggactagtgatataatagcccagacataaaaattctgaaaataggctgagtggtggcgcatgcctttaatcccggcactcaggaggcagaggcaggtggatatctgagtttgaggccagcttggtctacagggtgagtttcaggacagcagagctacatagagaaaccctgtcttggaaaaccaaaataaaccaaaagacaaaaatgctgaaaataggtaaaactaataagtgatgttagagtcaagattgtattacctcagaggagagtttacacttttgtcagttattaccaaatgtgtcagtgaagtttttattttaaggcttttacattttgtgtatatgtgtgtgtaagagtatatttcagtgtgcgcacgcgcgcgcgcacacacacacacacacacacacacacgtgcgtgcgcgcatgcttgatttgattcacaaaggagacacaactgtgcaactaccacttagctcagtgtctggagcacttcttacattccagaagtctctcctgtgccctcaatcctcagaagaccagcctccacttctgtccccatacttagttttacctgctctgatagcataagtggtgccagtgtataaaattacttttgtatattttgtttggcacagctacatatccggaatgggactgaagggcctgaaagtttcctgacatattctagagttgtagcagatggactgagttgtaagcaccccactcctcatgagagtgaggtacaagaaactggctttctctaagtcacaaatgtcagaatatggaggcacttctaactagtctaattttcttcctcctttttactgtgtggtaccagctctggttctgcctgtcttcctccctccctccctccctccctcacatatccccagccccctttctaccttaatattttttagtttgagatggggttttgctaaattacctagactagctttgaacttggcttcttcctgtctcagcttcctgagtgtcccggtctcaaactcgggacaaatggcaaactgaggtgcctcatcttagcaatttgtcttgagtttctttgagacctaacactaagtaccaggagctacaagtgtctaccaggcccacgtttgggttttcttcatgttggatttccttttggagacagaggccaggatggaggctaaggaggaagaggaggaggaggaggaggaggaggaggaagaggaggagggtgagtggtgtcccggagctgtctctgttgctgacctttgagaggtggttagtgtttttttctttctttctccagacttcctagtgcaggaagagaactgaaataggtggtttcagtgaacgctctatggcacccttccccgtttttttgttttgttttgttttgttttgttttgttttttaaactctgtttctggaagtgcaggtcttttttgcatgtatgagacttcctgtgactcagtttccactcttgagtgccttacagccttgtccctgtccctgtcactctctgaatcccagattcctgactgagtggactgtctctctctgcctttgtgatcccctgacaatgggaggtaaaaatagcccaggggctgagctacaggagataaaagggaatttgccttttgtgtcctgtggccaggctggggggggctgtgacacgtggagattgctgacatagttctcctttgctgaccttgacagtggcaataaaaggggtagcacagcttcctgccctcacagtggtgccaaggtgggtgatcagggctggggggtaatcggagctgggggtgtgatcagggctggggaagtgatcagggctgggggagtgatcagggctagggcaggtgatcagagctggggtgggtgatcagagctggggatcgtgatccagggctaggtttggtgctggagggaaggcaggagagagcccattgatgggcccaggtcctcagtacctatagcaaaggatgctcttatgcttggaggtgtgcattttcatgctcacccggggagacccactatcaaaccttgtgagttagagggtcatactccagtatggaacccggcccctgagtttcctgtcattgctatcttccagtgcctgctgcctagagccaccttgaatcgccgcccagattttcaggcctcctcctccttctcctcctccacctctcaccatcatgatggatgtgagtgaacttggagaatcagccttctatctacgccagggctaccaggaattgatgaaggtgcacactgtcccatgggacggtaagtgagagcagaggggagcacagccatggagaagcccaatggtctcagactaggagtggagagggctgccattctgcttgttactacaggggcactatggcccagcacctgggatgttccctcagtttctgggtgtgagaggctaaaaatcacagaaaccatgtgaatatgattgtgtggctgcaagcaaggcttggtttgtccctctgtaaaatgggataatgtcatcttgctcttgatgtctccatgaagactcaggctggactggggcctctgaaatgagactgatgtgtgcaggtggcctccatgttcacaaaacctgtgctggacttatttttagtgttttccatggagcccaagcctctgtttattagggacaggaataaagactactatttatgacttgattggctcatagtacaataataacataggcagtgtgtgtctagggcttactgtgtgccaggcctggagctgatgactttctgtgcatcttctcaataatctggtaggtgggaaccaaagcagagccagatcagtggtgtgcaacatctggagctgtacatagcaccatgttcaagaggtctggtgcttagctgggcatggtggcatacactcagcactcaggggccagaggtaggcagatcttggtgaattggaggccagccagagctgcatagtgagaatctgcctcaaaagagaagtgtctcaagcttgatttgacattcttctcgtcatcttaattgttttcctttgtttaaaattttagcatgcagagttgaggatttccttgaggtgtttaaactttttaaatgcatttaaaaaaacacaaaacaaacaaacaaaaaaaacaagggagacttgaatgaatagttctgaccaaggcacaaggttaccaaccgggagggcagggaccagaatttgctgtctgtatgagttcacattttttaccatcataaaagtctgggctctcagaagctctagggtgagctgaccagtcaggaaaaaggagatccccaggtgttcagtgaaatggggaaggtacaagacacctgagagctaggagcctgatattgatggggtcgtccacctgggacatcaggaggcctcatggcctttgtgtttaaacaggcccagagagaatgaggtttcccaggtggcagggagctgaatccagacatgcactgtagactcctttcccaatcagctcatttgagacctttagggaccttcccagctctgtccagggtttgaatgagtcctcactggaactcccagcccctggcagaaggactagatggagaactgtggggagggcactgctttatgcccacagtataggaactcccctggacacttagagcccctctcaaagtctgatctttctgcaacccaggcaagaaacgggtctgggtgcctgatgaacaggacgcctacgttgaggccgaggtcaagactgaggctactggaggcaaagttaccgtggagaccaaagaccagaaggttgagctccccctcccttgagattggctcgccagggtgcatcccctgacccgctggatcccgcagagtgaatgaagctggggtggggcatggtagcgtgtgggtaggagagagaagaaaagacagttggcccacctctagccctcatttcatgacacgtctccttggaaggtgctgacggtgcgcgaaacagagatgcaacccatgaacccaccccgcttcgacttactggaggacatggccatgatgacacacctcaacgaggctgcagtactgcacaatctacgccagcgatatgctcgctggatgatctatgtgagttcagggcagcggtgggtggggccactaacggggctgacctaatatggggcggggttaagggaagaagcggggctccgaaggaatggggtcaggcaagctgggttagaacagagctgcagggggactctggggcggaaggagcagaactgtatagtggcagaagagaaggctagagggagcagccgcaggtgaatgagaggaccacctagaacattgatttggtgatgtctagggtcttggagtcagagcaaggccacggggtagggcctgagatatggctgcctacttggcaccattgaagattcagcagaggactgtgggggccgttgttacatgggattcaagctgagacaggaggatggctgtgcatggcttctcaggaggcttcttgaagattgcaggtgggcctgggaatgggaacttggacatcttacttccctccccctaaaattccatctgtgaactctttctccttagacatactcgggcctcttctgtgtcaccattaacccctacaaatggctcccagtctacacagccgctgtggtggctgcctacaagggcaggcggcgctctgaggccccgcctcatatctatgcagtggcggacaatgcctacaacgacatgctgcgcagtaagagctacctccttcgccacccctcagctccggggggcctctggctaggactccccttcccttccatctagcactgccctcctgtggcacgaccctagctactcgacctcttcagtctggaagtccgccttggtctttcccactgggtctttgccacaactgacccagaaagtccacctatggttagtccctcaccctggctgacgtgtgtactctctcccctttcccctagaccgagagaaccagtccatgttgatcacgtgagtggggctctgggcatgaagtggaaagggctggccatttgctggtggtgatgaggcagcaggaggagggggtggtggtgaatcaatgttatttctcaagattggattcaaagttcttagggcagggcctttacctcctggagccagtgtcctccacttcccatttatgggtggtgggcagaaagcaggtaattaaacacaggagtggccccaagctccttgctgtcttcccagagctgggatctcccacctggattctctggagggtctatataggcctcttccctggtcttcaaagcatcttctcatctctacctcagccctcatccttcctttgccttcatgggaaagagatccatttctgatgtatcgggttcatatccggtcaggccaatacatgtaaatacacacacacacacacacacacacacacacacacacacacacacacacctttagcctggttattacagtcactctgaaaccagacagagctggattcaggcactcacacttgcatttcttgctgtgtgcctttgggactctgagcctcaccaataagaacagcacaacctaagccgccacacaaaattaccaacagtcagtatgtttaaatgtgaaccttgcacagagcaggggcaggccgggaaatttctgaggtccacttccttattcataaaatgatcacagtctgccctatggggtcttctgatggaggtgggtaccgattggcaccaggaattaagctcgtggtgcattggcaccatcatctcagagtgtctgtacctgggagtttgcatctggggatactgagttgggaacagagatggggttgaggtttgggggctggaggaattagaacaatgggcattggtgactcatgtttgtgttgtccaagcggagagtcgggggccggtaagacggttaacaccaagcgggtcattcagtactttgccatcgtcgcagccctgggagacgggccgggcaagaaggcagtaagacttgcccacttgggcaccaatccccactgcttctcactggttttgctttctttctttctttttttctttttttctttttaaaattgcaactccccagagtccccagccctgcctgagcctcctaccttggtaagagactctggcctgagcaaggcttgaccagaaaacctgtggccacctccgtcactgtattaggcctgagccaggcctgctgcagccgtatccgccctccaccgcacagatgggagccgcatcgctgctcccagatgttttgtgtgtgtgtgacttttaccttgaagtgactgttttctcgggtcgtatgaatcaaagtcactgttacctgctgcaaaggagaggagcaggtttatccacagatgtcagttacccagagctggggcactgggagctcttgacaatagcacagcctgtggtttggttaagatgttctgaaacttcttaaaacagtggagacatgggggttttgttggttttaagtaaactagtctatctctggcccctgggccagctgctgagagctctgtggcttccgctgacccccatgcgcctacactgaagtgagctgtcttctttctgggccccaggtttcctctgcacaacccacactcctggtcctgttgagccttgctttattctggggcagttttctttttcttcttgctgtgttttctttcttcttttgttttttatccccaccccctttaccccctttcctcatttgattatcttggtttttggactttgttttggtttttggttgcagccatttttttttttttttctgtccctcacccctttctcccctttcctcatttgattgtcttggtttttggactttgttttggtttttggttgcagccattgttgttttgtttttgttgttggctttttttatactcttcccttcctttcccaccatgttttcccagccctaaaaggtttttgaggatactgcagaaaagtgagggtgaccccgtaataggaaagatgacagagactaaagctgaccggaacacagctggaaggtctagggccaggggcagctcagagaggtgcagaggccacccatgggatttggtgacttaaaacctgtactaacctctccccttgagttagatttagctaagctggctagaaagagttctgaacagaaacagtggtttgagctgggcagggagatcaggagttatttcctccatacttccagtagtgtgcctagcgcgtttttaaatcttgggctctctggagatcaataagtgaatgagtgaccacaaagtccctggcaacatgtatactgtccccagatctgttcctctttgtcttctaaggctcttggcgttgggtggggtggaggtggagaggcggagaacagtgaaacatgaaaatggaaggaagaatgaagctaggaggggaggagggagtatagactcagaccctgtgtccctctgagtgagacacagaagggcatcacaggaggcaggatgcttgaggtgacccctcccccaggacatgggctgatcaattccttgatctgatggagctaatcagtcacagctagcagggccacatcgaatatccgtctacacaatgctaacaacacagacagcacagtacagaaaatatgcagaagggctgccagggaggttaggataggaaggctcagggtcctaggatgtccctgttagctcagagatcagggatgtcttctcagaggaggaggggctttggcaggcctccaagggagagaagacactatccacatccctgtgtgaatgtggtcaatgaagagattcctgagatggagagacaggtttgaccttagtacacaggaggccctcgtgccacgggcctcaaggtctcaagcctatgactgtgcttgcttccccatctagcatctctcagctaatggccacaggaaagctaggtgtacagacaggggaggacagaacattacgtttaacattactaaatatttgggcgactaacaacactgtcccactgactactgtcccaatgtcccacccttttcggagagacctcacatcctctgacattttccttctccctccagcaatttctggcaacaaagactggggtaagtacagggccagtggtgggtaagataacatctatggggtcccagggtgcccacttcttacaaccaaagattccatgggctgccctgacccctcattcctgctgccaccaggggaccctcgaggatcaaatcatcgaggctaaccctgccatggaggcttttggcaatgccaagactctgaggaatgacaactcatcccgctttgtgagtgggcacagtgggggattttgtggctggggtggaaaagggtcactagccaggagggccctggtggtgggaaccaacaggactgagggtggcatgatccgtctgctgcagggcaagttcattcgtatccactttggtccctcagggaagctggcctctgcggacattgacagctgtgagtctgggaaagggcagggcaggtgtgggaggagggacagaggctgaactgaacaaatcctttggcttccctctgctctggccatttctttccaccccaaccagttcctacttgcatccttctcacccatcatatcggcctcctggtctctactctcctgccttgactgctagtcagtctatggtccaaagttgatcatgccctgtccctgcttcaaaaccttctctagggagctagggggaggactcatgggtaaaatattgctgtgcaagtacaagaaccagagttcagatcccagcacccatgcaaatgctgagtgggtgtggtagcctacttgaaatcccagcccttgggaggcagaggcaagaagtcttagagcaagttggatcataagggcttcatcagcgagctctgggttcaattgagagacttctgcttcaatgtctgaggttgaaagtgatggaaccggacaccagaaactcactcagaggcagacacaagtcccatacagtgacttcccagggtgtgctggcctgtgcacagactcaggcacctccacacattgcctgtccttcgaggctgctgcctctcatccctgcagtgtctttgctcaggggagggaaggagatagcaggccggcactccttctctgcagatctcctggaaaagtctcgagtgatcttccagctgcccggtgagcgtggttaccacgtctactaccagatcctctcggggaagaagccagagctgcagggtgaggctcagaatggagaataaaaccatcaggccaggccctgggtggctattcaccctctcagcagagatgtgggtaacctccactcttctgggggctcacagcctgtctgtctgtacccctccctactccttcctgctgcttcttattaccatggagccctctttgtaaaaatgtttttggtggtagttgttgaggggtagtgggggtagtggtagtgtgggggtgggtgacggtgtgcctgtggtaggaaacaggcctcttaccgccattgtcctgccaagattgcagctgctcctgccatcctgagattagaacccctacccagcaccaagggaacccagtggtagtctatgtacactctcacctttgcaagccctttgaaggcaaagtctggtcctccctttgtcccagtatccaactcaggatctgggctggagggatgactgtgagcagcggtcagaggatgagtgagactcatggactgaggtccagtctccagaggactgtaaagagacacccgccagacatgcacatgtgctttagaaatgaaaacgggctgaggggtggcacacaactttaatcccagcacccaggaagcagaggtagatggatctctgtgagtttgaagctagcctcatctatatagtaagttctagtccagccagggatatatagagaaaaaccttatctcaacaaaataaaataaatatctaaataaataaaataagaattttggtttttttgtttgtttgtttgttttcaagacagggtttctctgtgtagctttttgctttgaagcctgtcctagaactcgctttgtagaccaggctggcttccaactcactgagatccacctgcctctgcctcccaagtgcttggattaaagcagcagccagccatgcctgtattcctctactcagaagctcttaagttcagggccagcttgggctacatagaccctgtctcaaaagactaaacaaataaacataagtaaaataaattgaaagtcacatatatggataatagggaacagaaactcaggttatggagaagccctgggaaggaatctagacttgctgacagagatacccccagggcctcaagatggcaaggagagggaaggcagcctgtggactcagcctgactcaccctttggggcatcttgtccacagacatgctgcttctgtctatgaacccctatgactaccacttctgcagccagggggtcaccaccgtggataacatggatgacggggaggaacttattgccacagatgtatgctcggtgggggagggggagtgggagtgggaggtggtgccaagctgggttcccatggtgtgcgtgtgtgtgcgcatgtgtgcctgtgtgtgtgaacatgcgcactgggtgtgtgtgtgtgtgcatgtgtgcctgtgtgtgtgaacatgcgcactgggtgtgcgtgtgtgtgcatgggtgcctgtgtgtgtgaacacgtgcactgggtagagaccaggaaatatgactggtgtggcagtgcctggctagactctcaaggacccgtccttctctgcacctgctttgttgccccgcctcagcatgcgatggacatcctgggcttcagtgtggatgagaagggtgcctgctataagatcgtgggcgccctcctgcactttggcaacatgaagttcaaacagaagcagagggaggagcaggctgaagcagacggcactgagagtgagggcctctaattccaggctgacctggcctcttccctggataccttgtcctgtacatggtcattaatccttatccgtaacctctgacctctgaactctagaccctcctgagggtgacaattttttatgcagtccttgactcctcccatccttcctcttctaatcccactctgtgacaacagactcccccccccccccccccccccccccccccacccccccactctccccccccccctaaccctctaaccctacccaagctgtgctccctccaggtgctgacaaggctgcctacctgatgggggtcagcagtggagacctcctcaaaggtcttctgcacccccgggttcgtgtgggaaacgagtatgtgaccaagggccagagtgtggagcaggtgagatgcctgcagactaaagctcagccagggacagctgaggcagggtccctttcttgccaggtcccaatcctgccttccttcatccacaggtggtattcgctgtgggggccctggccaaggctacctatgaccggctgttccggtggctggtgtctcggatcaatcagaccctggacacaaagctgccccggcagttcttcattggggtcctggacatcgctggctttgagatctttgaggtgagaacagctctcaaccacaggcattgttctgaggcaggggttgatgggtggatatgggggaccacatccctgcttccccatgggcctggtccccgtctaccaggaacctgctgactgtggcactgcccctggtagttcaacagctttgagcagctgtgcattaacttcaccaacgagaagctacaacagttcttcaaccagcacatgtttgtgctggagcaggaggagtacaagcgggagggcattgactgggtcttcatcgacttcggccttgacctgcagccttgtatcgacctcatcgagaaggtcagacctagggggggacattgtcagaagtgctcaagtgtgtgtgtgcccagaggcctggtgcgtgtcagctgtgtattgatgtgtggttgtggtgaagcatgtgtgtgtgtgtgtgaatgtggttgcatggctgtgcacacaggtgtaaatgggaacgtgtgggtataggtgaatagtgtcataagtgacgtaagaatgctatgcagccattgtgggcagctctgccattcaccaggcccggtgcagaactcatctgagcagtctcttatgtttactggattggaacacattgcatatgcttccccactgcacaaagaagggaaaagtgaattgacatcgttggaaataaaggggggagggattccctttgagcctcccacagcctgtgcttgtgtgtgtgtgtgtgtgtttgtgtgtgtgtgtgggtgtttgtgtgtgtgagtggggggggcagaggacagcactgtgtgtgtgtgtgtgagtgggggggtcagaggacagctcagtgtgtatgtacttcatggacacagtcccagtgtgtagtatgtttatggacacagtcccagtgggtcgtatgtttttcctctgaacacacattttccctgctgtgaagaagccagaataggccttgcggcaggtgactctgagtctctggctgttgggcatttaggttggcttttttttttgtctattaaattagtattgaagtgaaatcattttcccatttgaggcaattcatagctgcatgtaacttcagtcccaagggatccaattccttctggcctccatggacacataaactcatgcaggcacacacacatatacacacatatacatacaaataaataaacacttatttttaaaaatatagacttagtaaaatgcaggatccctaattttgttgaatgtggggaccaaaatgcagttagttggccttaagaaacaaaacccaaaaacctagagtgttcatgtgagccatggacattagtcaatagagcgcagagatgccaggctggtctgcacgcacaggcaaagaaagagactgaaagtcaagccacaaactcttctctcctagaaggtgggctcctggttatagagctcgtccctggccctcctgcagatggctgggttatggatttgaaacagctcccagagggagttagtctggagagcgagagtctaagaggccagtcagcatgttctagcccttcaatcttgatccctgtccccagcctctgggcattctgtccatcctggaggaggagtgcatgttccccaaagcttcagatgcaagcttcagggccaagctctatgacaaccactctgggaagtcacctaacttccagcagcctcgtccagacaagaaacgcaagtaccaggctcacttcgaggtggtccactatgcaggcgtggtaggtgcccccctggaactctactctcaaccactgtcctctcccttctcggggtcaccatcttgggtcaacacttgtctctgtaggtaccttatagcatcgtgggctggctagagaaaaacaaggacccccttaatgagactgtggtccccatcttccaaaagtcacagaacaggctcttggccaccctctatgagaactatgcaggctcttgctccagtgagtactgagggacaaggtggtcattcccatggatccagagtgacattccctggcatgatcagttctcatatctctactagctgaaccccccaagtctggggtgaaagagaagcgtaagaaggcagcatcgtttcagacggtgtctcagcttcacaaggtgaggtccagacagggctccagcagccctggccctctgcagcctgcaatgccctccgctttctgccgcatccctgtgtcttgggtgggcagctgttaagacttgcagtgatgtttagctcctctctatgtgaacatcacagcaagtctgtgctgctgcctgcccccgtgctgcctgcgcagggctcgggggagagggaagccgtgggagtgagccctgggaggggggacgtgaagactttggtggaggatggggtgtcatagggagccagagaaaaagagcaggtgcaggtgcatttgggcccctctgctcagtccccactggtcccatccactgcagtatccaattccggttctctgcccttcccgtgccttctccactcccaggagaacctcaacaagctgatgaccaacctgcgggccacacagccccacttcgtccgttgcattgtccccaacgagaacaagactccaggtggtgtccctgggctggtcaggattggggaactggaaatgctcttaccttgtagggtctgctcattcccaaagtaaggcctgggtagggacctaaaggcatgtccttggatttctaacctcctcctttcactccaccacaatctaggggtcatggattccttcttggtgctacaccagctccgctgcaatggggtcctggagggcatccggatctgtcgccaaggattccccaacaggctgctgtatgctgacttcaggcagcggtgggtactggcttcttcagcgctgccatagcctccttctcctgcttttagattaggtggagcctgaggggtggaagggacaagttagagcccaagggacaaagagaggttctagtcccggaggagaaggctccatcttggcgggggggggggggggggagggtaaggagagccgtgaatacgctgtggcaaatgtggagagggaggctgcaggcttgccaattacgtggatacagagtaagaaaggatgagctacggtgactcccgggtttagacctaagctgttgcagagtgtatctactgagcaatgtggcaggatgtttagattgggtgcatacagggtttgagcatgcccagttagaaatatctccagcagatgtcctggaagaggcgaggatgggattgatttattctggagctcaagtgaggagccaaagaggacacagatttgggaactgaatataggtttgtgtggattggaccccagctaatgcctcacaggttgccagtggtctgtcaatgtcatcagctcccttcccactttccttggtaggttctgtttattaagctacaagaagtgtcctcagttgcttccctttctacaagtaacagggatcatttaccctgccctgtataaattagatgtctatacaaatactatacacacagtctgtaagtttggtttacatgtcattatcagtcttggacatggatccctatctccaaagactccaacatgagtctgtatcatcacccatttgttgtttgaaagcaggacattactgtgtagtctgggctagcctcaaactttcaatactcctgggcatggtgtctcacacctataatcccagcaataggcagctgggcaggaggatcaccaagggtttgaggccagcctggtctacatagtgagttccaggacagcctaggctacagatgagacatttcaaacacaaaattaaaaccaactcttgggacttggcagatggctcgctaaaaggcttgccttgaagcatgaagacctgagaacctagaacccacatagaaaatgttgggaggctggtgcacactcattatcccggtgccaaggaggcaggagttctgagaccccaggccacccagtatagtctaacagatgagatccaggcactgagaggcctgtctcaaaggaggtggattgcattcagggtagccctgagcctgtggtctggcctccatgtgtctgtgtacctgtgcctgtgcacgtacatttaaaaccagacctgtgctgaagagatgactcaggggttaagagcatctgctgctcttacagaggacctgggttcagttgttagcagccacgtggcgacttaaaaccatacaaccagctgtgtgggactccagctccaggggctttggcgccctcctctggtacatacatgtaggcaaaacactcacacacagacaattaaataacaaccctcaatccttctgcctcagcctctgaatgctgccagtacaggcatgtgtcatcaaccggaatacatcactattgtttttctattgcctgtaaaacatacagtggtccaatgaccaatgcatcttatttagtgagttcaccctagtgaaggggtctggcctgtctctgggaatttcccttcacagtgtgattatatgcccatctaagtggaaatgctaggaatccttgctccttttgaatagaattctctcttaaatttgtgatatggtgtagcatctatgttttattttgtttttgcctttaagaaattataaaagttgaacatgcctttataaaaaccacgtccctttacaaactcactaaagtgcacttaagccaccaagtccgcttttgaaacagggtcaggtcaggtaacaggctggcctcaaggatcttcctacctctgcctcccaagtgctaggattctgggtgtacgctgtgcacctggccctgtgctgaagtctgtgtagcatgtgctgcatccctcagtatggccatacttccctctgccatcctgtttagcgtatgtcccttaggaaccccacctctgagaggtcaggcaaatacaattctcttgccacagctcctggcgtcccattcattgtcaatggcctgtgctctgtcttgtccatgccagcttctccctgatctcctaggtaccggatcctgaaccccagtgccatcccagatgacacctttgtggacagcaggaaggccacagagaagttgcttggctcccttgacatcgaccacactcagtatcagtttggccacaccaaggttagggtgcactggagttagggctgaacctgggtgcctctgctcacactggacaggggtcccacttggctacaccctgcccttaggtgttcttcaaggctggacttctaggcatcttggaagagctccgggaccagcgcctggctaaggtgctgacactgctgcaggcgcggagtcgaggccgcctcatgcgcctggaataccagcgcatgctaggaggaaggtagcatgggatgggggatgggcaggagggatggggacagggtggcacaggggggggcggggtaggtgtgataaccgtcccaaggctcacactctcaccctgcctcactgcctaggttgtcccccagggtggattcggatgaggttctgtgtcacatcatcccaacctgtttttataccttaaaaacaggatgagagccagagagatggctcagtaggtaaaggcacctactgccaagcctgataacttaagttcaattcccaggacccacatggtggaaagagagaactgacctctacatgtgctctgatctccatgcatgtgctgtggagcatgtgtgcacacacatggctttttgtgtattcagaatgtggcctggagggtaacggcattcagtgcttcccagactttgaaccatgtatcttatctatcttatttatggttaaagtgaggtagccctctcgggtgggtaccactcagcagagaagtcaagcagtctgatcacagggcctggcagcttagctgtctttagacacctgcagaggccacctgggcattcggaggttatggactttgccttggaagtatatctgtgggttagagagagagagagagagagaggacatggcaccttgaaggggcagaaccagctgcctcataggagctgtccttccctagggatgctctgtttaccatccagtggaacatccgggccttcaatgctgtcaagaactggtcctggatgaagctcttcttcaagatgaagccacttctgcgctcagcacaggcagaagaggagctggcagcacttcgagcagagctgcgggggctgcgaggggccctggctgctgctgaggccaagcggcaggaactggaggagacgcatgtcagtgtcactcaggagaagaacgacctggccctgcagctgcaggcagtgagtgagacaagggctctgatgaaaatctctaaccagatgtggccagggcagctctggagggttctgagtactttgatcttctgtgttgtcttcctactctggaagtaccaggagatgaggcctggagactcagtgcccaccattccctgtaggccttgactgtccacatgtcctaaggctaaagccgcaggagagccccagctccaccttccccaatgtccctgaaatagacccttgttcccctttctggttcagggacacaggaatctctgaggcaggtaacagggttctacctagagggcaggtgtcaaagtctggaaactcctcagcataggttttgagagtcacttggatgccagccccaggctgatgctggagatgctgatgctggggacggcacagccatgatggttataaaactccccttctagtataggaggctatgcaacaggcagtgtagaagtatgaagaaccctgtctcctccttggatggcctttggtgctgctccgtggtgggcgaggcctggcctgcacccactcacactgccctcagagggtggcagctccgaacagtcgagtgcacagtagggcttctctctgagagctcttaggccctctgggttgcctgcattgtggctaacattaattcttaacagtgccatttctgtcccacgtccaatgccctggagaggcccctgcaatctacagagcccctatagtttccagggccgggcagagtgtgggtgcttcaaatcctcacctatcaaactgaattgctaacatttgcctcaccggagttgcctttgcaaggacaaatggcctttctttctcagggctggtgtccctctttaatctggctcccccacccccatctcctcaggagcaggacaacctagcagacgctgaggagcgctgccatttgctgatcaagtccaaggtgcagcttgaggcgaaggtgaaggagctgaatgagcgcctggaagatgaggaggaagtgaatgctgaccttgccgcccgaaggcgcaagctggaggatgaatgcacagagctcaagaaagacattgatgacctggagctgacactggccaaggctgagaaggagaaacaagccactgagaataaggtgtgggaagggccaagctgggggccagtttaggtgttaggcagctgcagggtcccctgggcccctgctgtgtagcctgaaacaggtcactgccccctgtgggcctcagtgctatcatcggtcaagtccggtaccagcactttatctcactagggtgatgaggatttggtgtgtaactagtctttgctaagtatacactacagggccttgcatacagtaggtgcttagaaaatgtcgcaattatcatctgtcctggactgcgagctcgctggagggggcaacttgtccgaactgcaaatccgtctatcatagagacctcatagtgcctatggttgccgatgatgtattgactctgtcatacgggagaggaaagcaaggctgttcaggttctcacaggggctaaagatacagccaggagtagtaaagagctcagtacctgttgatattgcaaatggctgccatccactggtctcttactccgggccagacacagtgctcggctatgagcctttaccagtgaatccttctacatagctcgaggagcatgaaacccttgggcaggaatggtggaggctcagtgcagtggcctgcctgcatcctgcagctggtaggggtggctgctcagacagcctgtggggaggactgtccctactgtgactcaattgggctttggcacaggtaaagaacctgacagaggaaatggccacactggatgaatccgtggtccggctaaccaaggagaagaaggcattgcaggaggctcaccagcaggctctcggtgacctgcaggcagaggaggaccgcgtgagtgcactggccaaggccaagatccggctggagcagcaagtagaagatgtgagctgcgggctacatgggggccgtcagggtggcgaagtccccagcccgtgggaagctgagccccactctaccccacagctggagtgttccttggagcaagagaagaagctacgaatggacacggaacgtgccaagcgcaaactcgaaggagacctgaagctgacacaggagacggtgactgacactacccaggacaagcaccagctggaggaaaagttgaagaagtaggtggggcttggtgggtctctgagctcaatgggctcttcttcccttctgaattctcccagccctgctgtgggggagggtaccagggcaggtgtcatgtcctgccctctgaaccagggctgaggacagcagacgcatgcacaggattgaggctccttagggcctcagggacggaggcggacgggggggactgcagttgggaccagggctggctcatcccaccatgtactcccaggaaggattcagagctgagtcagctgaacctgcgggtggaggatgagcagctcctgggggtccagctgcagaagaagatcaaggagctacaggtgtgcatggcagcagcggggaatgcgctgggtagacccggcccggggcagaggctcatggagttggtaccatctacccaggcgcgggcagaggagctggaggaggagctggaggctgagcgagcagcccgggcccgagtggagaagcagcgggcagaggcagcccgagagctggaggagctcagtgagaggctggaagaggctggtggagcctcagccgggcagcnnnnnnnnnnnnnnnnnnnnnnnnnnnnnnnnnnnnnnnnnnnnnnnnnnnnnnnnnnnnnnnnnnnnnnnnnnnnnnnnnnnnnnnnnnnnnnnnnnnnnnnnnnnnnnnnnnnnnnnnnnnnnnnnngcagcgggggggcggcagccgggggggtggggcggcgcggggggggggggagggggggtggggggcccccggcggggcggcgtgagggctgccgcaagcgtgaggctgagctgggccggctgcggagggagctggaggaggcagtcctgagacacgaggccaccgtggccgcgctgcgccgcaagcaggcagagggtgctgcggagctgagtgagcaggtggacagcctgcagaggatccggcagaaactggaaaaggaaaagagtgagctacgcatggaagtggacgatctgggggccagcgtggagacgctggcacgtggcaaggtcagcctccttcctgcctctaaaccacttctgacgccacagctgacccagccctgtctgatggccacttgatgccaatactccacagcagcaccaacccctgggccccagctgcttacttaacctggcatctaacccccagctcctgccaggcctgacttctaaccctgactgctcaacttcagtccctgcctccaggttgttctgattcgcaccggaacttcagacctcccacccaatagaagtgtgatgcagctgtgactcccgagttcacacttaatagccgccctaacaccattcttgtcctgaaccccagcaccgaactcggacacccccctaccttgaacctaatcctaacaccagttaccagtcacgcctattagcagccgatggcagatccagaacctaattcccgactcactgcccttgggatgagtcagtgcccaccataggaactcaaacctggaacctggaacgcaatctccttttgatccctggtctcacacctagtgttccagatcccaatcccaggttcccatctctgactggcagcccctgtcagtcaggactgggtcctgtccttggatgcacaaacttgtcttatcttggattctgtgctccaggccagtgcagaaaagctgtgccgtacctatgaggatcaactaagtgagaccaagatcaaagtggaagagctgcagcgacagctggcggatgccagcacccagcgcgggaggttacagacggagaatggtgaggcctggctttagctgggctatgccaggtagggtttaagtggtgcccctcaaccgactgactggcctgctggcccctacacctgcaggggagctgggccgcctgctagaggagaaggagtctatgatcagccagctgagccgggggaagacctcagcagctcagagtctggaggaacttcggcggcagttggaagaggagagcaaggtggattggcactggcaactgcagggcagtcgggtgggccctagggtcactagcatggattgatgctgaggccaccggtgtccctgcaggccaagggtgcactggctcatgcagtgcaggctctgcggcacgactgtgacctcctccgagagcagcatgaggaagagtcagaggctcaggctgagctgcagcggctgctgtccaaagccaatgctgaggtggcccagtggaggagcaagtatgaggcagatgccatccagagaactgaggagttggaggaggccaagtgagtagctggtgtctagaacataaccgatgagagattcgggcctgtgcctttatgtcctgtatgtggtggtcgggattctggggttctttccccaggctccctagtccatcctgcctgctgtgtggtccaggaagaagctggccctgcggctgcaggaggcagaagaaggggtagaggctgctaatgccaaatgctcctccctggagaaggccaagctgcggctgcagaccgagtcagaggatgtgactttggagctggagcgggctacctccgcagctgctgcactcgacaagaagcagcggcacctggagcgggctctggaggaacggaggaggcaggaggaggagatgcagagggaacttgaggccgcacaaagggaggcccgaggtctgggcactgagctcttccgnnnnnnnnnnnnnnnnnnnnnnnnnnnnnnnnnnnnnnnnnnnnnnnnnnnnnnnnnnnnnnnnnnnnnnnnnnnnnnnnnnnnnnnnnnnnnnnnnnnnnnnnnnnnnnnnnnnnnnnnnnnnnnnnnnnnnnnnnnnnnnnnnnnnnnnnnnnnnnnnnnnnnnnnnnnnnnnnnnnnnttccgactgcggcacagccacgaggaggcgctcgaggccctggagacactcaagcgggagaacaagaatctgcagggtaggaccccaggtccagagcactttagggtcaccttgaaattgggaataggaaagtcacctggagcagggcggatgtgagggtgagtcctccctctgtgctctgttcaccctgtagaggagatcagtgacctcacagatcaggtcagcctcagtgggaaaagcatccaggaactggagaaagccaagaaggcgctggagggggagaagagtgagctgcaagctgcactggaggaggctgaggtcagggctggccacaggggtgggtggactctggtccacgcctccctggcctggttggtctcacccaaccctgcctgatccacatccctagggggcactggagctggaagagacgaagactctgcggatccagctggagctgtcccaggtcaaggcagaagtggaccggaagttggcagagaaggatgaggagtgcaccaacctgaggtctctggagggcggtcttgatgtgcctacggtggcacattggtgggaacagccagtctgcccctgccacagggtcagggagctcccattccagatgtgatcctccacaagtctaaggatgctcagggccaaagttcagcccatgtccccctggcctctagtgaacttactgtttctggcaagtcacaagtcacatggggctttaaaacagagagaagcaattcttgtcccccaattgggttttcatctccgtgcatccttgggcatgatgccacaggtggttcccggcctgcttcattcctgcaggctaagtctgcccttcatgccaccctcccaggcgcaaccaccagcgagcagtggagtccctacaggcctccttggacgcggagactcgggcccgcaatgaggcactgcggctcaagaagaagatggagggagatctcaacgacttggagctacagctgggtcatgccagccgccaggcaatggaggcacaggccgctactcggctgctgcaggcccaactcaaggaggaacaagcggggcgtgacgaggagcagcggctagccgctgagctccgtgagcagggtcaggccctggagcgcagggctgcactgctggctgctgagctggaagagcttcgggctgccctggaacagggtgagcgcagccggaggctggctgagcaggagctgctggaggccacagagcgcctcaatctactgcattcacaggtggggatgggccaagggtgtcctcaaggattgggagggggcagagccctgctggccagctgaggctctgctcccctcagaatacaggcctcctgaatcagaagaagaagctggaggtggatttggcccagctaagtggggaggtggaggaggcagcgcaggagaggcgggaagctgaggagaaggccaaaaaggccatcactgatgtgaggctgggccagggttcgggacgagtgggtagagcccaaagagattctttcgccccctggccaccatgctatttcctccccacaggcagccatgatggctgaggagctgaaaaaggagcaggacacaagcgcacatctggagcgcatgaagaagacactggaacagactgtgcgggagctgcaggcgcgcctcgaggaagccgagcaggccgccctccgagggggaaagaagcaagtgcagaagctggaggccaaggtaccttcagccccaccttgccctgtagggctgaggctgaggcctgctcccctagcagacttccctcctaccctccgactgtcccgcaggtgcgcgagctggaggcagagcttgatgcggagcagaagaagcacgctgaggccctcaaaggtgttcgcaaacatgagcgccgggtcaaggagcttgcataccaagtgggttacggggtccatcccagggagtggcactggagctaacccagtccaggcaaaccctgagaccccctttgcttgcgcagacagaggaggacaggaagaacctggctcgcatgcaggacctggtggacaagctgcagagcaaggtcaagagctataagcgccagtttgaggaggccgtgagtacactggggggccaggcatctgggattgttcatgatgccagtggcgagctgatttcaactgcaggtcttgaagcccaggaggcatctgtagcaggctgcattaaagggtggcagccatgtctgctcaacccagggacttctatggcatgatcaccttcagctttagaagggaccaaagtgaactgcttccttcttctgcccaggcctggggatggcctggtgggaaagtgacacataggcacctcttaaaggacagtctccactttgggtccaggtgtggggaaggatggtgacaggaagagtggaggaggaccaagagaagccagcttctttctgggctgggagcaggttggccatttgttaccaaggggaaccaaggccctgcctatgcctctaggagcagcaggccagcaccaacctggcaaagtaccgcaaggcccagcatgagctggatgatgctgaggagcgagcagacatggcagagacccaggctaacaagctgcgggcaaggtccagggatgccctgggccccaaggtgaggaggcctctgtgttgggtgtgtttaagttgggcagacacagtgtaactcagactgtctcatctctcagcacaaggagtgacaccccaggctctgaagagggacacccactgcggtcctgctgtctcttcccatcttcggccacgccaccctccctgaaccctgaagaaaacacagggatgcacaccagccactgtcctgatttctggggttaggggagctgggaatagaatttcatggacaaagtcaggtccacatcagtctttaaaataaagttctttaatagtctccatttaattggtttatttgctgttaattggcaacacaggaggagccaagggtaagctctcagccaggctcctgtgtctgggctcaggcaggcacaggcactccacaccccaagggatggagagaaaaggccccccccccaacttctggggaaccttcgggatgaacacagtggccaatgagcgaagacccagaggagctaaaggaagacaagggaggtgaggagggaggggggaggagagatgggcagacctgggggaaggcagcattctccgatacccacccctgcctagggctcaggagcctctgtccaggccccgaggccagggaggcttggctcacaggggtctgactcttcctctccatcaggggactgatgggagaagctcagacagagatagtttcccatgttccctttctctggcaggccagagctccaggattgtgagggaagggtgggcacggtgccattgtccttaccctggggacagtgaggaaaacaggctccccaatgacccaggccctctgacccaggagacaagagcttctaggctgttccttccactgagcctatacctgaaaactgggtagacagagccgtggggaggcagagagggacggggacgggcagagtgtgcggcgtgtgcactcacgctcacccacacttgcccaggcccagcagcttcccgaagcctggctccagctcactcctcagtgaagtctctgtctatgtccatgtagggctcctcaatgtagctgaccagggcagagggcgactggcggtctgggttcaacaggatggacactgtctctttccagtatgagaagctgatgcaggaactctgggtggagagagggggggtgcacagaggacttgggccaagtctgctcacacaggagggacttggcaggacaacagtgagcagcctgtccacagaggggcaacctgaatgccctactgagtgaccctgggttcacatgccactgtcctcccatcactcaaggctggggcactcacattctccaggcaggtgctgtccttgtccttgtgcaggtaatgctgctgccaaaagcgcagcaggttgtggaagttgttgagcaggaagccagggtatttcttgctgtgctccattcgctgtagaagacgcagatagaggggcagcctctctttccgtcgggccagcatcaggatcactaggctggtgttgaggcagctgacattctcctgcaaggccaaaggcagccggactgagtgcatgtcagcagcctcaggatgccagtgaacctggacagccactgggcagggaggaggcctacacaggggcctggcataatccatgggcacaccttcatgttccctatgcccaactaccactatccacactgatactactagatggtccttgtctacatcttggttcaggtatgacttcttccaggagcttccatcccctgctggggctgggtgcatgggctggtgcactagaatgtgagttttagaagcagagtctcagttcaccttgctcaccaagcacccctcgcccaaggcccagtctcctaacatgtttggcaggcagcaacaaaaaaaccactgcacagggtcctagtatgactctcatcttagaaaagtgggtgtgaggctgggagaagagagggctgccagttagtgaaggacttggggcaatctcaggtccagttccaccgcccactgtagcctgaaggtagggtgtagggtacatggggaagaacgttggcttggagtcagaaggcggcagcgtcaatcttatctgtgtcccaactgactctgtgaccccaggacacttgatatctggtcttagttctcctgtaaactggggcactgggcgacaccctaggagaactacatttctagagagaagcgggggttggggggcacagataagagagctgatctccattctaccctcctttgactgctcattggctgggacgtctcacctgggttagtgtctgcacatggatgatattgatgaggcggaagaggaaggacatctgtgtgggcacctgggatatgtaggcaagcaggcggcattcggacaggacctcagccactacggagggaagcagaggtgtagaagcaggtgcatccagtggtgggccacccactccatggttaagccaactttggctgaagagatggcttaacggttaagagcatttgctgctcttgcagaggacacacaacggtggctcacactatctgtaacctcagcaccacagcactcaatccccagtcaccacccactcctgcactcacatgcagagccccatacacagacacacccacggacacacattgcagaagatctgtttgtacttcaagatgtgtctctgcctaaagtgccttctgactggtttaataaagagctaaatggccaatagctgggcaggagagagcaggcgggacttccgggcagagggagcaaaactgggaggagtaatctaggcacacgatttttgccagcagaactggaacaagctggatgtattgtagtaagcagaggtaaccgaggcacatggcagaatgccaattaaaaaatatgggttgggggctggagagatggctcagaggttaagagcactgactgctcttccagaggtcctgagttcaattcccagcaaccacatggtggctcacaaccacctgtaatgagacctggtgcgctcttctggtgtgcagatatacatggaagcagaatgttgtatacataataaataaataaaatattaaaaaaatatgggttaattaagctgtaagagctagctgggaaaaaaaaaagagactaagcgaaggccaagatttcataatagtaattctctggctcattatttgtgaggcggcagtccaaagatagtctgacaagaaagcctgttacatttggcgcctaacacatagcatgtaaatccacacagggcctgagaaagcgaaaaaaaaaaatgttcccagtaggctcccatgcttgaggcctacagaggccctgctaccaagcacttgaataggtttgaataggtttatgagcggcaggtgggcgtgctacttggaggtggtagcgcctagatagaagcgcctacaggcccaggctgaggcccaggctgaggcccagaggcatgacactccctctcaccatgtgctaagtggagccacacagtggagggcctagccatagcttaacagtttaaagtttggctaccacagtcagagaaggctgcagacatgcaaaaaagtcaggtctagattgagaatacatctaaacagatacaatatgcttaaaaatgtattagatgctaaagaaagaaaagaaaatgggtatggacagtcatagaaaaaaagtgtagcaggcttccttttgggccaccaaccagctcccaaatcaagacacggagacttcttattagttatgaatgctcagctttatcttagctcttatttcttgctagctctcataactacttaaactatcctgtttctcttcatttacattttaccttgggtctctctctctctctctctctctctctctctctctccctctctctctcctccttccctctctctctccctctcccccctggcatgcttctctcttctcctttgcttagatctcttctctgcccaccagtcctgcctacccctctcctacctagctattggctcttcaactttttattagctggaatcaagtgccttaggcaggcaaggtgaaacaaatgcaacaaatctttacacaattaaacaaatgcagcaaaaacaaatgtaacacacatttacacagttactattctgcagcataaacaaatgtaaaacatctttacatagttaaatattccataacaaaatagttttaaaaacaaaggttcttaaagagagtaaatataaaaggaaaaagatgggaaatatacagggtgtatggattttgtatggtgttttgttgactttaaatttttaaaatgctaatgaacaaaaaaatagctgctgagagacactggattatggaaactgctaaattaaaccaacaaatatattatttaaagaatatcttaacttcagaatagaagtcagaaaatacattgtgttgggggagaggttttgcttttgtttccatgggaaacaaaaagctatagatttcttcaaaatgaataaacaccagatttgatcagaggagacctcttgaaaattttggctacagacataaagacaccaagaaagactataggacaggtgatatgtattctgaccccttgacatgggaacagctctgagactggatgagacatgatgaatcttgctggctccagaatcctcatggcttattattacatgccagtcttttatgtgacatggatacaggtttagttatgcagtcctaacagacttttaaggttaacagatggcttttatacctgctcaaatatacaacaaaaaactcgtctttataactgacttatgtacacctcacagtccatgcttgagttaatttagatatataggttacctttaaaagtttgtgttttcgggaaaaagaaaaacaaacaaacaaacaaacaaacactgaaaacaagtagtccaggtggcccagcctctcagaatgcctctgttgcagtttcctcaaaattctacatctagaacaacttcaaagctgctgagatggtccagcctctcggaatactccaggcaagacttcagataagccctgcactttcccaccacacagagactaaacaaaaaataatacagtcaaatctcgcccaagattcgatcattgtcccaatttcctcagggtcctctagagatgctgttgccccagacaacaggaagcagtctagagaacatgatgcccacattctcaagaggtggggtagatgatttttggttgttcaatggattatggatgcttatcatcatttaggggggtgggctacaagttgttgttggccatggtcggggagaaagttgagcaaaggagattagattcagagacctcgttctgaaaaggaaaaagggagatatggaaaggataggataaaagggtagattattgaatctactttaaactaaaaagcaagtattaatctcaaatatcttacactggtatggattttttatattgatacaaatttaaggttttttgtgagaaaataatatatatatatgtttctattcttaagatatttttgtatattaatacaaatttgaggttatttttgttatactgtatatatgtttctactcttgtttacggtagtatacttatgtaactctaaaaatgtaatatacaattgggaaatgcaggttaatagtcaactataataatcaaacttgtcatgtaaggtatattttcaaggttaaacagatatacattttaaatagataggtgatcttcaaacacttcaatatggcatttacgatgttttaataactgcaggctttttataacagtgagacacatttgcttctggcagcaccaatttacttcataaaaggatgatgggcatcgaaaaacctccacacagagtttgctttctttgtatcaaaagttagccgtttgaacaagaacttgcccttaccttaactgctgactgtatgctttccaaactggacaagcaggacacaaaagaagacaactgccacactttgtcaagacaaggtaagacagtccttcaaaattcctgcttcaccgaaaagtctgtcagatatgctagacctgtaggccaaagatggatttcctaatgttgcagaggaaccttgggtgactgtccagacagccagcagtctctgtcatttctatagttttggaagttgcttgttctgcacttcctgtttactcagttaatataatatacttctcgggtctttgatgaggttgaagcctagatagttatagttacagttttccttgttaccaaattcagaaaagacactcacaaaagagagacataaaagtttaagttgtttatctaagatgtttaaagtctaaaaagacattttaggatggtaatacaagttagctgataaaaagtggattaggtataaaactttggactaagataggatagataatacagtactttctcctaatttgtcaaatgcaaatgttctggacattgtgaatgtaattcttacctgataattgttcttattgtatttagttttactatgttagagttaaaacctttcctttttaattagacaaaaagggggaaatgttacggaatatttgtttactgtgtaaagatgtgtctcctgctaaacgtccaatagtaggcaagagagactaggtagactaccaggcagagagagagaaactgggaggaggaatctaggccactcaatttcatcagcagactcagagcaagttggatatgctgtattaagaagaggtaactgggggctggagagatgactcagaggttaagagcgctgactgctcttccagaggtcctgagttcggtttccagcaaccacatggtggctcacaaccatccattatgagatctggtgccctcttctggtgtgcagatatacacaggagtagaatgctgtatacataataaataaataaataaataaatagatagatagatagataaataaataaataaataaaatctttaaaaaaaagtcaactccattaaaaaaaaaaagaagaggtaactgagccatgtcgacaaacatagatttaaaaaatatgggttaattaaattataagagctagttggggaaaagtctaagctaaggccaagctttcataattaataagtctccaggtcattatttgtgggatggcagtccaaagacagtctgataagaaagcttgctacacatatataattaaaagtaaatcaatgacaaaacctaactattaaaagctgcaacaacagtatcaatctccaactatttgtttatcaatctaaaccaaatctcagagatccaattggtgcttgagaacctcgctcagaaagtggccctcctgcagctctctcccagctgagtgggcgcccagctccagctctcacctatattccttctcaggaagacaggatgataatgaccattaagaaacagcaagtctggggagatggcccactgggttaagtactgttacacaagcatgaggttcagagcttagattctcagaacccatgtaaaaagccagtgtggcagcgtacacctgaaaccccagagctgggggacacagacagaggaagaaccctgaagctcactggctgaccagcctagccaaattcatgaactctaggttcagtgggagactctgttaaaaaattaaaggatgtcaaactctgacctccacatgtgtatacacacatgtgcacatacccacacatacataaatcacacacatacacacacacagagagagagagagagagagagagagagagtgtcagtcaaattcaaactacctcacagagctcctactgtgactggctggtttacatgtctctgtccacttctgcagcctgtacgtaaagagcgctgagcaaatgacctcctgtactattgtgaaggtgatcaatacctgcttacactaaagtctatgtgaccaatctcctaaaacagacccttcagagaagaaacaggaggtaaatatctaactaaccatgaccaggatatttttcactaccaaagacaatgatgagggatactgtccttttttagaagtgctcataaatttgtgagaaactgcttagtgacacagacctcccagggaagaaagcgcgtatgtccaaatgtatagctacacacaattctggatgacgtctgacaccccacccaccataaccacacactacacaggaaaacagaattgctagcagtcagtccagaggaaggtggcttttcccttcactacaatgttatacttgttcactaaagggagcacaatcagtggagaagtcaacacagctgagcaatgcagccaagcccacctcttgaccccagccacacatatctgggaagtaattcagcaattcctggctggaggccaggtgtctggcacgcatacagcacccatttgccttggtaccttggctgcctcacctttcatgtccacctggttttcaaatcggtccaatgacagagtaacacagcgcaccagcatgttggagtccaccagggagctgttgatctgcttcaggaacacctggaactggtgcagagatgatgctcactagcaggggctgctagccggggaccactggtctaccccagctccactgctctgccaacaagacacactaagtggcctgctctcactgctgggctgccaggatgctgtaacccagccaatgtcctcatcccaaaattcttaggggctggctcaaagcctgacacagagtaggtgtagtgaacatttgctgactgccctttgaatcccagactcttccaaatgtgtgaccacacctgaagagttgcaggccaaggttcacagacaactgatgctgcagcaaccaccatggagctcctgggtgagccttacctttgcatcagtgttgatatatttattgaatctcttgaatgcatcgacattgaacttcatcagctctcccaggaggtcaaagtagctctggagtacatccctcgacttgcactcgctgtccacaatgcagtataagatgtgctggggtgagcaggggacagggtgagggtgtggatgggactgtccctacctgtttgccactcaggcctggcctggagcttagaccactcacttgcttccagcaagcatccaggtagatggaagctgcaactttgtctaggttctctgctgagggtacttggagccaggggagtaatgtcagcagggggctgggtgggcaggggttctctgctagagctgaagctctgtctccagatctaacaagcactgctgtccaagcactagggccacttaagtaaatgaaggacagaatttaagggcagcatacacattttgaccctaagagctgtctttgtgtttatcaatgaaattgttaataacatataaaaatcagtaagtatttatcaagaatgaaccaatttaactcctgtttccaatatttcccatttttgttttctgattggttgatccccctccttcccttccttcctttcattactgtttttttttttttttggagggggacgacaggatctggccttgaacttgcaaaactcctgcttctgcttctgaagtgctgaggcttccaataagctcaactccttttccaaacttaactgatttggcggttattttcctttagaattcatgggccagttagtaattttttaaaaagacctagtgtaacttggccatttgctctcttatgaatttgctttttctgaaggccattgatcaataagggaatattaatttttagtcaatactatatcattctcagggtccagggatttgctgggtaactccatagtctatattcctacatgattattcctgagtccctcagtcacccatcagtacctatagggaggggcccacagctggcaatccagggcaaaccctggagcaacatgcacttggaacaactagacctgtccctaaccaaagtactcaaggctcaggatgagacatcaaggcaaggggctggggaggatggtcacctgacacctggttcgtcagccatacctccagaaggcctcgcttcagcaggaacatctggtctgcataggaggtggtccctcggaggaaactttccacagcccgggcctgccaaaacctgcaacccaaatgttgacccctggctatggctgccctctcctggttgaggttcaattcccccagggttggagctatttgcagccaagtatctgacatttactgaacattttccagttctgggcctcatccttaggtcttgagaacagagcagtgaacaagggaacggctgtccttctatcatggctcacaactcagcagggaccagtcttccacatgactgtaccagagaaggtttgtatggcagaggtagtagcatccaggcttaaaaagtggccgctagttaagtgccatgtgaaaacactctcagaagactggaaggacatgggcttgggagccagggaggtgtgtggccagcagcagagcatgtgtggacaagccactgagctagaaaagaggtggcagacactgagtagcccagatggctcagctgggatccatgagggaaggtctgactgggcgaggatgaggtgacagggaccctgtaggcacagggctgctggaatcccttgtctgcagccttcacaactttcctgaggtgactaggaactctgcagccttctccttggtgcctggtcacctagcagatggctcctggggcagcttctggctttgtttttcccatgctgactgaagcaggtgtctttcttctcatgcttatttcctatgactccaggtaatgtcacacaggcagggccgggatcccatttttgccccatctctctagtgccagcttgatgaatgctcagtcctctcctggcataccatgtcgacgggggtacacacacttaccatctgagtcatacggagccagtggcaatgagggcaacttcccccattggtgaccactcttaaggaatgggtactagagactaaccaattgggaaagccctggctcctaggccccgaagtgcacctgtccatagactcacctgaaggaagactctgctggctccttcttcatgacctgcagcagccgagttagtaagcccctcttgccatcacacaccaaactcctgaaagcaaagggacagagcactggtgacagacctgaatggctgacagggaccactgagctaggttcctgtgctcatgtagatggatgacagagtaggtgaagcaaggatgctctcttcttccaccttgtgccaggacctcagacacactgcagctgtcaatccaacagcccagtgcatttctattgcatcttaggccagttttccctcctcagactggctgggaagaggcagaggcacatccagggccagacatggctcagaacagccagaggaatggccatttatatcacaagtgggtttaatccaggccacagcagagtatgccagatggaacaaagtttgtgccaattgggcagggcccaaagttccttttcctgccccagggtcagttccagctgaactgtgggcttccaggccttagcttcttgtctgcgaggcaaaggcagtaggtaagaaaatgattaggcctgtcatggtgtcaggtgtctgggcccttaaattctctcttcacacagcagcttcacttccaccccctgtagacatcagggtggcgctgtgctcatctcatcaggatgctggggagttatggctctggttgctggataaggtccacacttcataagctcctgtgagcctggcatgtcactgtgctgttcccaaagatgaggcagacatagccagtacacgggacttgattcttggcagggggcaaagatctgcttaccctgcttggcacagttgtcactggcaggggatgaggatatcagcaaaggggccgtttgcatgggacaaggtggaaggacagagtacagctgacctttggcaggggccacttgagacatgtcctctacatacagagaggaaggtgatgatggcacttccttctgagggctgctgtgatgttcaggtaggaaatgcagatgtgagtatctagcacatgaagccggcggggcatggtagctactcttgagacagggcaggtatgcacacctgtgtgtgccctcctgcaagccctgtggctacagctgtcccccaccaggatcacctgtcagtgttgaggacagcttccacctcagggatgttggctttcagagagatggcactgagttcatttagctcctgattgttgagcagcaggtacttgttcctgaaacaaatgggttcaaagggtaaagggcaggaccggggctgctgaacagcactgctgtggaggttctgccccttcctgtggggaagagaagctgagaacccaccagcacttccacacctggttgtcactcactgccaatgccttcccttggcatctccagatctccatgttgtgcactgaacatttctatatgacttctcaaagtcacctgcacttctgcatggccaatcccatctgccatcttattcctggagtctagccctgctgcaccattctcagtggccagagcatcacataagcagaggcctgaccaactgtcacagatctgtcttcttcatccaggctcgtcatgatgggtctgtgctgagacagcatcttcagctgtctcccacaggaagggaaccctcacacagctccttgagggattttcagaacagggcttagaccctgtcattattgaaaatgcttcccctagctcccaccacttcagctgtgtaatgcctagggagtgaccatgactcaggccctgtgcagccaggctacctctgcagccacactacaaaccgagcagcttacacccaccacaccatctggccactctggttttcatgagcaggccatgtccttcctgcagtggcttctccacatgtgggccttctggctagaacactctctcacgcttcctcttcatctcattcaggcctctgctcacaaattgcttctgcagtaaagagtcactgagtgccagctggccagccagtcaggaaacctgccactgtcctttcacagaattgtgctcttctgtccccaaatactaggcccatttgtcatcatgcattcttttactggtgaccttttctaatgttatacttccttcccagatgtgcccttcacgatagcatgggccaaagtttccattcctcactgtatcctctgagccaggcatatagaaatgctgatttgagagactgatgaaagctaggaacagacacagacacacacaaccacctaaaaaacccaaagacaaaaagaaaacaagtgtaattctgtaacctatgggtgccttcagccatagacatcctcccaagagagaatcacaaagagacagaggcccctaggccacactgttctcacaagagagaatcacaaagagacagaggcccctaggccacactgttctcacaagagagaatcacaaagagacagaggcccctaggccacactgttctcacaagagagaatcacaaagagacagaggcccctaggccacactgtcctagggcatgctctattagcttgtacaatgctccaacactttaaatcaacatttaaaaatcaggttaacccccagcactgtgagaaaatcaaaaggacaaactccccattgttaactactctaggcagttcacagatgctttaatttctttgggagactaaaaaagtaaaaataaaaccagaagccatgtaccagtgtgcccacttccttgtgagcacacagttgtggtcaccgaagtccttactgtaaagctcagatcaagatcgtgggctttcactccctcccctgcactgttttccttatagtggacaaccattttcatgcacattctccatgaaaagcttaaacattaaaaatcaaagaggagaatatcttaaaaagtgtgtgtgttgtgggagtcaacacatttcactgtgagggggcagcagttgtccttttagggggctgtggaggtgcaggaaaaacccagtacagatgaaggcgggacagacactccaggacaccgggcagttcccaccagccctcctgagtccaaggtcagagaggagattccgggacaggcctgtagacggcacctccagggcacacatacttactcatggtggtcactgaaactctggagaagcctcaaaaactggatcttcaaggtaatgtcctataacaaaaattaaagccacaagagtcatggcacttccacataaaacaagtgagctctggagacatctatcttgctacactgcttcttttgagtccctgtcctcaagcacagtggtggtttttctttagttgaaaagtcaggtgttcatagctgaccagtgtcaaggtaaactaatgtagactttttaatgtagactttttctgctaacaacattcttgcatattagatttaaaaaaaaaaaaatcactccagtccttttacatatgatgctgatttagaagctagaagaggaaaccagagagcccaggcagagatgcttaggagctgagggaggtgtgtggatgagagaggagcctagttacaacaaggctatggcttcagtgccctgcagtgaccaggcagaactaacctgtgagctagagagctgagcaagaaacctgcctcttaggcgtggctggtaggagctttctaggagaaatacctaactgaatgacggggccaagaaattaaacattaaaagggagctcctttgaaagaactagctcaacaatgtccaggcagaggctgtacaggtccccaagatggtcccctcccaaacaccacacatgccaccctgagggtgtaaaggcccaaagacaagctaatggtaccacaggaacatctccaagggaacaaagaaaacaactgacaaaccattagagataaattgcaaaaggaaaaacagatgtagtgtgtttacctaacaaataaagaccaactggtctctgaataagtcagatatgttatctagacatgtaaactatactccttttaaattatttactcaaatggacggaatgaaaaacaatctgacagggccaaagagaaggacacagcaggaggcaggcaggaggcaggcagggggcactgaggaagtgcaggttcagggacccagggcacaggcttctgctagctttacagccttcaggttggagcaccttcctgctaatggtgtgggaaggcatatggcctgtcttgtcagagaaaacggaagctcagagattctgtgacaaagctcagtggcaaaggacttccagttctcagtttaacgctctatctgggtattctgagaaacaaagaccttctgttctcatcttcaagaacaagaccctcagggaatcagcagcagcacccctcctcttaaaggtttattttatttattatgtatacagtattctttctgtatgttggcttgaacatcagaagagggcatcagaacccattacagatggttgtgagccatcatatggttgctgagaattgaactcaggacctatggaagagcatccagtgctcttaacctctgagcatctctccagcccccaaaagcagttcttaaaacagccaactcatagcagttaatatcctgaatgttcccaggctctcttacttaccgggctacagtcacagttctggttgtgaccatggaggacaagggcagatgctgaatgcttcctccaaatcagtttgtcaaacaaattattgagtcctgggatcaacttgaactcagcaatcatcctgtggacctgtgtggggtgggaagggagaaacagggagaccaatgtatgccccagatcagcaaggcctctcctcagtacaaatggccatcctcaggatgaagaaagcaattgccagaaccgagtgctgccatttaaagatggcattcacacagcatctaccctgactgcacagaaaaaccgtccttaaaaatttctgtatgtgagtatgtgcacatctgtgctggtgccctcagaacctagaaagggtatcggatcctctgcagatgcagttataggctggcctgcaactaactatgaggagtgagtcatcctatttggcttagaaaaaaaaaaaagttttgttttttggtttttcaagacagggtttctctgtcctggaacttgctttgtaatccaggctggccttgaactcacagattcacctgcctctgcctccctagtactgggctgacaggcatgcttcaccacacccagcagcgtgagcagtctttatggtctgtttttctgtggtactctggtcttttgaggacccattagaatctcctgttaagctgtacacattttctttattaggtttctgtgtcactatgaaaggcagtctgaaggaggaagatttgtttcagctccctgtgttttacagatgtcttgtgtggagatgagtggtagaacagaacagtccccgttgtgacaactaagaggcagagaaaaagacagggagggcaccagggacaagaaaccctgaatgatctaccccccagtgatttactgcctccaataggtccttcctccttgatttgagaaactcctgaagtgttgctgccacctgtgaactgatggctactgatgccaaagtcagataagactttgtctcctttgcccatctgaaaaagcaaaattgtttgagatatgaatttctctccatactgtgaggttgagcttttcttgttgtgatttaagaacattttcttgggactggaaactaagaaaggacaacccagagtcaggacaaccagggctacacagagaaaccctgtcttggaaaacaaaaccaaaacaacaaacaagactgttcatgaggtttcagaggaaataggatttagaggtcattaataatacagtctggcaaataacttgcttatattctgcctatatcctaaagctttgtgggaggctgagtttaaaggtgacagacttaatttggaaggaggaaattttaatatagcatagcacttgggctgtggcatggttattgctggctgcttctagataattttacagtgaaaactgggagcaaaaaacagaatttataaagcaaagtaggttagccagaaaaagaaggaattgaaagttgtggataaagatgggaaagagattagggtcattaaaaagaagccaagcactttgcacaggaatagaaaacagacagggaaagtgcctattagactccaggattagagggatcccacctgccccaggcttaggtataaggccagaagcttattggaaacactctcctgagagcagacagtggtcagggtgctttgctcacacaaggccatctatacaagcacactcccatgtttggcttgccagacactcaaagaccactgtagtggcccaaggaggcatagccattacctattttagtagcacatgttggtatcactcacaggatattagttttttgctttgtttttatgacagtgttttgctatatagcccagactggctctgaacttctgatcctcatgccttctcctccccagtgctgggattatagatttacaacactatgtccagctcatgtgatgctggttttgcagacgtgtaaattgcaagacttatggaatcgcgaggctttcactgagatttcaaaggaaggtctagagcggggagatgcatgaacccaagctgtgatggagagcccaggatgtatgtatagcaaccacagagggagctgcaagcaatggtagagtctgtccgggagagatgtcaggaaggctacaatgacaaggtcacagggcaaggctcccacgccacttaagttcacctcaagaaaccacactccttattctaaacacagggctacaggtttctctgatgagttttggtctcactttcatctagcctttctttgccagtcaccagaggacctgagtttggttctcagcatccaagtcaggtagctcacaactccagctccaggggctttggtgtcttttcctggcttctatgggcaccagcacacatgtatgtgtgacacacacacacacacactcacacacacactttattttacaaggcttataatagtaaaaggcttggtgctcagtgttcagctggagggtctactttggagagctttaggaagtagaatctagtctgtctccagcttttcctcttggtttctggctgcaccaggaggaaaaataaccccctttccctttccctttatgatactttctcaggtgtctggtcatcagtgcaaaattctggctaattcagcaccactttggtgacttggacaccagccatgctcacaagtttctggtgacagggcacgctggtacaactgcaggaggatgtttgggcactactcctcaaatttacaaatctgtatttccttggtcaacaattccccttttatcatcagctggacccttatacatgataaatgacattatgtactacatcagtggtagagacattataatacccaatgcagatataatttacactcagttaaacaaataatgatacatccaaatgatgggataaacggaaaagaaagaatccaagtttttcacagatgctgagctgtgaacaatcaaagaaatacaagtgtgtgtgctgtattcaattgaatgtataaaaatcgtatttgtgcctgtaagtataaaatagctatagaaagaaatactgacaatggagaactcatatgtactccaggacgctgaggcccaggagggggataggctccattgattctactagtttgtattaactctgggaattatgtgcctactaattttttttttttacataacatgaaacaagacccttgctacctcgttaggacagactatccctgctatatgcacagccagagagcgaatgaggctggaaccaaccctacgatcagttactgttattctatgggcagtgaagcccagcaagactgtcctagacaaggtcagctaaggacacgctacaaactcaggcatcttgtcctgaggtctgcctctttctagctaaccactggaccgaggtggaagaggtaggttacaggggaatgtctttggagggtattatttaagtctccctgctggtcctgaagtaagcaattttgctctgcacacttttcagtcatgatgtgtgacctagttataggccaggaaaaactcagtcaagaaagcacggacctctgaaaccatgagccacaataaaccattcctccctataaactgtttctaccagatgttaccatggcaatgagaagcaccagttttcaggtttcacagtgagcacagttctaggctccgatcgcatatcagagtggcagctgctttactgcacctacagggctggacctttttttttttttaagataatgttttaattttttgagattaaattacatcattcctcttttcccttttctccctctaagccttccccccattattccttccccctggctctttcaagtcatggcctcttttgtttttagttgttatagagtgtgtgtgtgtgtgtgtgtgtgtgtgtgtgtgtgtatgtgtgtgtgtgtgtgtgtgtgtgtgtgtgtataaatacaacctgcccagtctatgttacttctatgtatgttttctgggctggccatttagtattagataactaactggtgtgctcttcatagagtcagtcttttttttttttttgagtcaaggtttctctggtgtagccttcttggctgtcctggaaatcactatgtgcaccaggtacatattgtcaatctttaatcttgcattactaaaataaaagtttgttcttggctttcacaatcactatctagaaatgctgcctaaagcccagagcagacactccaggctctataatcagtctagtttccttacgaggaggcaaataacgcacagaaagggcaccaagctgagaagacctggtgaagttacacctggcaccccacaggttatgtggcatttgctctcatctctgaagtaagatcctattggttttatcaataaaaacacaaagtcagatgtttaggtaaatgctgagagatcagagaagcaaagaagcagccagtcactttttacctctctgcatcctcagaccgaaatagccgacatcctgtcatacctggtcttatcacttctgtctctgtcccatgttgtcacttcctgtctcctctttgtctagtcctccagacctctatggttaactagtggatatctccaccctctgattccaggcaaactttatttgtcacaacacaactctcccattctgaggttggggagcacccacctggtttcgttgacgccccatcagcagcacacacaggacgtagagcacttccagtttgtacatgatttcatgcataatcttcattgactggggcagctgggtcctggctgaggtatgcggcagcgcattgtcccctgaagtgcctacaggaggggacacagtggaggctggcgtagccccagtaagatgggtaaggtatggctccctgagaaaacctgctctacccacaggcctgctgtgaagggattggatttagagagccgtcagacaggactcaaaccaccattagacattttaaaagccaggaaacctcctcacacctgcaaggcctcctgtagttctgcactctccaacactaagtaaggcattctgacacagccagtgcagtaagtagcctctccctgctgcttcctgtcaccaaccagtcagtcagtcagatgtctggcaccaaattgtggagaccactcttcaggtctccagtgaccaagcatttggtgctgtctacatattgctggcagcaggagttccagttttataagagttccctttaaggaacctctcttattcactttattacccacttgtgagagcccagcactgggttcttagaagagatctgaaaacggacagtgatgcacgaagatggtaagaagctgcacggtgcagtggttaagagcacagacactgggccaggctgcaggtctaaccccaggcctggctctgtggtgttggggaagttgaattacttctttgtacttcctagtcatcctcatttgtgagacagtggtgatgtcagtagcaagtacctgctactgttaaaaggatagaaagaattaacatacagaaggtgcttagtacaatgcccgaacaagtaagcaacatacaaggatgttaaataaacttaagaaaagaaaaagaattcttctgctaatgcttgcctgctgtaatttagaaatttgaagttaactaatacataaaaacatactgtacttattaatggggcatattagatgaagttttgattagatagacatacaaatacattgcttaatgaatggcttaatcaagttaaacattatcttttcaagcatccaaaattctctatgttttttgagatatataataatatagtatatacttgtctataatcccaggcaataacccactggaactttttgtttttattttcatttatttatttggtttttcaagacagggtttctctgtgtagccctggctggcctggaactctctaagtagaccaggctggacttaaacccacagagattcatctgcctctgtctcatgagtgctgagattaaaggtgtgtgccactactgttgggctttttttttttaaatttaatttaatttacttatttattttagggatggtcttacactgtagacctggctagcacggaacttgctatgtggatcaaggcaggcgtgaactcagacatccacctgccactgccttccatgtgatgggactggtgtgtgctgccacactctgcagactgggattcctcattgtcatctaactgtaagtcaggcacttgtgctttcttttttgtcagtctgtgtgctcgtcctggtagcccaagtggcagcaggcaaagctgaaggaaaaaatgtaccattaaaaaaaataaatctaagtgagaaaatggtattcatttagtctatttttctctacacaggagaaaagccaggctcactccatccccaccaggatatcctcgccagcaccgagaacaccaggagagtccagtggtctaaggagactgggcagcagcacacagactcttgccttagccacacttgagtcttgaacactgttatttaactggctctatagagctctggggaggcctggaggaggacacagctatgggaaggaggaggtccagaatggtacacatacaatgctggcagtaaagagtatctatgagggagggctggggagggcaggtcatgtaagtgagcacagagagaaggcagctggaggggcaaggtgaggaggagggaaaggagagaatgtggagtatgaattgttacctgatagttttaatttgtagttttttaaatggcaaaagctgttgggcaggttttcatatgtattcagccttttttttttttttttttttttttccctttttggaaaaatgtctttttggatgactccattttccctatttggaaaaatgtctatttggatccctgcctatattttggaatgagctgtctttttattattcttttttgtttgtttttttggtttttcgagtcagggtttctctgtggttttggaggctgtcctggaacttgctcttgtagaccaggctggtctcgaactcacagcgatccgcctgcctctgcctcccgagtgctgggatgacccccgcccagtgtctttatttttcttctacagtgttcttcacatgctttgttttttgattcatttgcacgtttgtgtctgtgtgagaccagaaaagagctcaggatccctgggaatcaaattcatgtcctctaaaagagcaacaacagcgttcttaagaacgcccctgggccatttctttagccccatattactgggcactgaacacagggtctcacttgtgctaggcaaattacacccctagacctctttatacattctgtattcaagtcccttattacagacatggtttgcaaagccattctgctcctcgggtcagtcttttcactttcttggtgatattttgaagacttttatgaaatctaatctgtgactactctgctgctgtgcttcagatgccacatctgtgaaatctagtcaggaagaccttcccttctgtttgctctgcacttcgtatgcttcccagaggcaccctccatacctgtctggaacctaacatttagttcagagacctgaaaactgtctccagggtcccttagagcaatctgtatactcccaaagaggccgcttaattggctgcagaaatttcttttttggaggtgagggggatttttacatctacatgtataagatgttagtctgtaactttcttgtgatctctttggttttggtacaagggtagaacttgtctcaaagaatgagctgagaagtgtttgctttatggaagagcttaaatgttggtagaattcaccatgaaaccatgaggtacagggttcttattttgagctgcttttgcatccctaattcaatcaattaatttatcatacaaattctgattttttatttctttttatgaagtaaagtggaacttactaaagttttaatacagtcctggtgtaggaccaccttagggaaaattctattgtaagcaattcttaattctccacagaaagaccaacaatgtctccaaggggcctgaaaagactcaccactcaagaggcccacaaaaagtaccttgactgtgctcagactcctcactggccactcgcatcagggcatctaacaccagcgcgttgtctagccatgtataccactcctccaattcctgcaggaagctggctgtgcctgttgactctgacacttttctagtcgccagtttgcaaagccgttccacaaagccagggatgctgagaagagcagctagaaggaaaaaaagagaaggcatttacagaacagctctgcagtcctgaactgtgacagggatggctcctttgttccttttgttgtcttcagttgagaaagcgtctctaaggcccaggctggccttgaattcctgatcccctggcttctacatcccaagtgctagggttatagacatgtgctaccccatccagccaggaaagactctactgtgatagcagccaggggtacccttttaaaaacaattaccaaggggctggggagacgactcagcaccacatagtagctctcaaatgtctctaactccagttccagggggtatgatggcatcttgtggcatccttggacaccaggcacccatgtggtgtacagatatatacgcaagcaaaacacccatatacataaaataataaaaaattaggtagccaggcaagttggtgcacacctttaatctcagcactcagcaggcagaggcagatggatctctgtgagttcgaatccagtttggcctacaaagcaagtttcaggacagccagggctggtatacagagaaaccccgcctcaaaaaataaataaataaatacataaataaatattgaaaatgaaatgtcaagccaaaataaaatagcaacaaacttcagaaacaaggtcagattttagatgtgtagggaaactggctctaagtgggaatataaatcaaaatacctttatgattttagtgtgtgtatttgagttaaatttttgttaaatttttttttagctacaaaaatatccagtcatataaacaaaaataagggatagagagacagctcagttagtaagtgtttgccacacaagcatgaggacctgagttccacccctagaaccatgtaagaagctggcccttagagccagcctagcctaattggccagccataggtctgtcttagctgggatttctatttctaagataaaacaccacaaccaaaagcacttgggggaagagggtttatctcttcttattcttccatattaacagtccatgactgataaagtcaggaaaggaactccaacaaggcaggaatctggaggctggaactgacgtagaagccatgggagagtgctgtttactggctcgctcagacctctttcttttattgctcagaatacacatgcaggggtggtaccacccacagcattctgggcccttcgctgtcaattagcagtcaagaaaatgccttccctccccaccctgcagacttgcctatgggcaatccactggaggtttcttcccatttgaccctagctgtgtgaagtttacaaaaactaacagaacaaggtcccgtatgagatgatgtatggcatctgaacacatgcatgcacacaaaaatctgtacagagatattcaatgactttcttttgtaatggtagaaatatggggatcactaaatgtctatcatttagcaaacagaccacatacgacaactccatatagaatataacggactttaaaaatgatgacgttttttatgtagttcttcaaaacacttctttaaggaaaaaaacacaaattattaaacaatattgatttaagcacatttttttcccaaaaatttaaaggacagaagcaggactggggtgtagctgggtattgggcacatctaggctgcatcaggtcatgtatttaatccttagtaccggagaaaaagaacagagcatatgctttgaggattcacagtggtgtctgcttatgaacaagacaggatagaaacaacacttcagaaactgggtgtggtggtggttgtgataaagaatgtttgttggccttccagagaacccaagttcaattcccagcacccacactgaggggcctgtaactccagtttcaaggaatctgatgtcctcttctggcttctggtgagacatacatgggatacacaacacaatacacattttaaaaaaataacaaaaattgcatgtgtgacttatggaatatccctttacactgtgtgaagatatatcattgtgactggtttattaaaaagctaaatggccaatagctaggcaggatttgggggcagagagaatgctggaaaggtggagtcaccagtcagatgcaaaggaagcaggacacgtgagacatgaggtaacaatccatgagccatgtggcagcacagaaattaatagaaatgggctaatttacgttttttttaatataaaggaattttatttatttttattttctgtacattggtgttttgcccttggtgtcaggtaccctagaactagagttacagacagttgtgagctgccatatgggtgctgggaattgaaccctgtttgtctgcaagagcttgtcagtgctcttaaccatcgagccatctcttcagcgccctaatttaagttttaagagctagttagaaacaagcctaagccattggctgaactttcataattaataagaagtctccttgtgtttatttgggagttggcaagtagacagagacttgctacaaatgacatccaacgtgggggcatgttatttccatataagacctgaaaaagcttaaaaaaaaaaaagtttccaaacacacacaaaaaaaggaaccaaacatggcttcctagtcctgcagtctctcatggggccatggtacagagacacatctcctggctggctgctggctgcgaaaatatgttatgtcaggaaagaggttatgcttttgtttccacagaaaatgaaaggctatggattcattcaaggttgatagagagcagatttgataggggaagaatccctgaaaatcctggctacacataaagaaataaacccagaaaaactataagacaggtgacatattttacctgctcaaacataaaacaaaaaaattacctttggctggattgggtacaacacacagtccattcttgggttaatgcagatatgtatgctacctttgacagtatgtgtgttttcagagcaggagcagcaggcaccagtgaaaacaggtggtccagcctctgttgcagtttccccagagttagttccacattcataacagcttcaaggctactggctgagatggttcagcctcatgaggactccagtcgggacttcatataagccctgcactttcccattacgtagagactggataacaaatgatacagctagctctaccgggacttgaccattatcccgatgttctcagggtgtcctaaagattccagagcccccagacaacaggaaacagactagagaatatgacacttaaattcccaagaggtaggataggtggttttggttattcgatgggttatggatgcttgttattgtttaggcggatacagaaatataatataggataaaaagacagccactaacctcaaatattttacattggtatgggttttggtaattgacacaaatgtaaagttatttatgttatactaaatgtatctttctactcttgttggggtattgtgcttatgcagctcatttaaaatgtgttgtataattaaatgcaggttagtagttagttatctataataatcaaacttgtagtctattacgtatgcttttaaggttaaacagatatattatagtttcagaggttcagttcattattatcatgacagggaggatggcagtgtgtaggcagacatgcttgtgacggctacatcttgaccagaaggcagaggaattcaactgactgtcacactgagtgaagcttgagaaaagagacctcaaagtttgcctcccacagtgacaccattcctccaacaaggccacaattgtaacagtgccactctctttgggggccattttctttcaaaccaccacagcagtcctttaaaaattcctgcttcataagattctgccagatattctaggcctataggcagaagatggatgccccaatgttgcagaggaaccttgagtgactgtccaggcagccagatgactttgatttctataggtttggaagtggtttgcactgcaattcctgtttactcaggaaatattatgtccttctggggtctttgaagactaagtagttattagtcattagttgtggttttactagtcatggtaaaaggtaaattatgtacagagctttgaactcaagacagaataaataatggggtattttctccaaatatacaaaatacaaatggactagatgttttaaatgtaattcttagctgacaattgttattattatttatggttttcttacgttaaagttaaaacctttcctttctatttagacaaaaatggggaaatgttgtggactatttctttacactgtgtgaagacatgtcactgtgattggtttattaaaaagctaaatggctaatagataggaaggatttggggggaggggaagagagagaatgctgggaagaagaaggtggaatcaacagccagagtcagaggaagcagggcacaaaggagatgaggcaacaagtcatgagccacatggcagcacataaatgaatacaaatacagaaatgggttcatttaagttataagagctagttagaaacaagcctaagctattggctgagctttcaaaattaataagaagtttctgtgtggctatttgggagctgcaggtgggacagagaaagacttgctacatgagaccttattgctgaagacaccatacacttcaggtgtaggacttggggaaacaaagctggaatgtgggcttcctccctgctttctggagtaccacaagtaccagaaggtgttattgaagctgctgggggagaactgtcatcaaaaaaaaaacttactcagctgtggatcctatatgctacactactgaccaaccagcaaaagtgcccatgggtgtacaagtggcaagtccatagtggggtaaccaactgctttctaattggagtggaagcctgttccataggaggaactctatgtttggtactgtaagcctggtcaaaaaccagtggtcaagtaggtcacagaccacagtggagaagctactgctgttgttttactaaatggacacaatgtgcctatcaaactgctgctctcagcactggtcagagaggctcccttttacagctggcagtggtaactgcagagattcattaactagtccaaatgctgagagcaaaagatgcttgaatactgtgccataagctggcatccatattacccttcaagattcaaacaaggaggaaaaggaggcaggaagaatttaagaatgatagggaaagaatgtatgagtggcagggaggggtggagggaaacaggctgttatctgggatgcccagcactgctgcatgcttcacctcatagcaactctgcttaccagaacaagacctccacacacccatctgccagcatcacaccaggggatgggggaagagcccatagggccccattctccctaatgacttactataggcagaaacaacatctaaaaaaggaggagcccattagctctcacccctatttgagcatctatagggaattaattgtcactggggggaaaggaaagatatttttagtggtgtaaccactaagtgtcacaccacttagtgtgtaattggtaagagaccaatgctcttgcaaataagccctcttctaggatcctattataaaaaaaaaaaaaaaacccaccctaataaaatgcaatggtaaacccacaagtgccccagcacacacacacacacacacacacacaccagtaagggaatggctggaatggttggagaacaagagagtagtgagagataactatgataaaagtacattatacccctaacacaaaatatccaggaaatatgggatactgtgaaaagaccaaacctaagaataacaggtatagaaaaaggtgaagaaatccaattcaaaggcacagaaaacatattcaacaaaatcatagaagaaaactttcccaacctaaagaaagacatgccaatgaaaatacaagaagcctacagaacaccaaatagactgaaccaaaaaaaaaaaaaaagtcacctcgccacataataatcaaaacaccaagcatacacaacaaagagaaaatattaagagcagcaaaggaaaaaggtcaagtaacctataaaggcaaactatcagaatcacgacttttccttggaaactctgaaagccagaaggtcctggatcgatattcnnnnnnnnnnnnnnnnnnnnnnnnnnnnnnnnnnnnnnnnnnnnnnnnnnnnnnnnnnnnnnnnnnnnnnnnnnnnnnnnnnnnnnnnnnnnnnnnnnnnnnnnnnnnnnnnnnnnnnnnnnnnnnnnnnnnnnnnnnnnnnnnnnnnnnnnnnnnnnnnnnnnnnnnnnnnnnnnnnnnnnnnnnnnnnnnnnnnnnnnnnnnnnnnnnnnnnnnnnnnnnnnnnnnnnnnnnnnnnnnnnnnnnnnnnnnnnnnnnnnnnnnnnnnnnnnnnnnnnnnnnnnnnnnnnnnnnnnnnnnnnnnnnnnnnnnnnnnnnnnnnnnnnnnnnnnnnnnnnnnnnnnnnnnnnnnnnnnnnnnnnnnnnnnnnnnnnnnnnnnnnnnnnnnnnnnnnnnnnnnnnnnnnnnnnnnnnnnnnnnnnnnnnnnnnnnnnnnnnnnnnnnnnnnnnnnnnnnnnnnnnnnnnnnnnnnnnnnnnnnnnnnnnnnnnnnnnnnnnnnnnnnnnnnnnnnnnnnnnnnnnnnnnnnnnnnnnnnnnnnnnnnnnnnnnnnnnnnnnnnnnnnnnnnnnnnnnnnnnnnnnnnnnnnnnnnnnnnnnnnnnnnnnnnnnnnnnnnnnnnnnnnnnnnnnnnnnnnnnnnnnnnnnnnnnnnnnnnnnnnnnnnnnnnnnnnnnnnnnnnnnnnnnnnnnnnnnnnnnnnnnnnnnnnnnnnnnnnnnnnnnnnnnnnnnnnnnnnnnnnnnnnnnnnnnnnnnnnnnnnnnnnnnnnnnnnnnnnnnnnnnnnnnnnnnnnnnnnnnnnnnnnnnnnnnnnnnnnnnnnnnnnnnnnnnnnnnnnnnnnnnnnnnnnnnnnnnnnnnnnnnnnnnnnnnnnnnnnnnnnnnnnnnnnnnnnnnnnnnnnnnnnnnnnnnnnnnnnnnnnnnnnnnnnnnnnnnnnnnnnnnnnnnnnnnnnnnnnnnnnnnnnnnnnnnnnnnnnnnnnnnnnnnnnnnnnnnnnnnnnnnnnnnnnnnnnnnnnnnnnnnnnnnnnnnnnnnnnnnnnnnnnnnnnnnnnnnnnnnnnnnnnnnnnnnnnnnnnnnnnnnnnnnnnnnnnnnnnnnnnnnnnnnnnnnnnnnnnnnnnnnnnnnnnnnnnnnnnnnnnnnnnnnnnnnnnnnnnnnnnnnnnnnnnnnnnnnnnnnnnnnnnnnnnnnnnnnnnnnnnnnnnnnnnnnnnnnnnnnnnnnnnnnnnnnnnnnnnnnnnnnaacagacactgaggaaatccagagaatcatcaggtcatacttcgaaaacctatattcctcaaaattcgaaaatctaaaggaaatggacaatttctggacagatttcgcttaccaaaattaaattaagaacagataaggaacttaaatagacctataacccctaatgaaattgaagcagtcatcagaagtctcccaaccaaaaaaagctcaaggtcagatggcttcagtgcagaattctcccagaaattcaaagtacagctaatatcaattctcctcaaagtattccacacaatagaagcagaagggtcattgccaaactctttttatgaggcttcaataaccttgatacacaagccannnnnnnnnnnnnnnnnnnnnnnnnnnnnnnnnnnnnnnnnnnnnnnnnnnnnnnnnnnnnnnnnnnnnnnnnnnnnnnnnnnnnnnnnnnnnnnnnnnnnnnnnnnnnnnnnnnnnnnnnnnnnnnnnnnnnnnnnnnnnnnnnnnnnnnnnnnnnnnnnnnnnnnnnnnnnnnnnnnnnnnnnnnnnnnnnnnnnnnnnnnnnnnnnnnnnnnnnnnnnnnnnnnnnnnnnnnnnnnnnnnnnnnnnnnnnnnnnnnnnnnnnnnnnnnnnnnnnnnnnnnnnnnnnnnnnnnnnnnnnnnnnnnnnnnnnnnnnnnnnnnnnnnnnnnnnnnnnnnnnnnnnnnnnnnnnnnnnnnnnnnnnnnnnnnnnnnnnnnnnnnnnnnnnnnnnnnnnnnnnnnnnnnnnnnnnnnnnnnnnnnnnnnnnnnnnnnnnnnnnnnnnnnnnnnnnnnnnnnnnnnnnnnnnnnnnnnnnnnnnnnnnnnnnnnnnnnnnnnnnnnnnnnnnnnnnnnnnnnnnnnnnnnnnnnnnnnnnnnnnnnnnnnnnnnnnnnnnnnnnnnnnnnnnnnnnnnnnnnnnnnnnnnnnnnnnnnnnnnnnnnnnnnnnnnnnnnnnnnnnnnnnnnnnnnnnnnnnnnnnnnnnnnnnnnnnnnnnnnnnnnnnnnnnnnnnnnnnnnnnnnnnnnnnnnnnnnnnnnnnnnnnnnnnnnnnnnnnnnnnnnnnnnnnnnnnnnnnnnnnnnnnnnnnnnnnnnnnnnnnnnnnnnnnnnnnnnnnnnnnnnnnnnnnnnnnnnnnnnnnnnnnnnnnnnnnnnnnnnnnnnnnnnnnnnnnnnnnnnnnnnnnnnnnnnnnnnnnnnnnnnnnnnnnnnnnnnnnnnnnnnnnnnnnnnnnnnnnnnnnnnnnnnnnnnnnnnnnnnnnnnnnnnnnnnnnnnnnnnnnnnnnnnnnnnnnnnnnnnnnnnnnnnnnnnnnnnnnnnnnnnnnnnnnnnnnnnnnnnnnnnnnnnnnnnnnnnnnnnnnnnnnnnnnnnnnnnnnnnnnnnnnnnnnnnnnnnnnnnnnnnnnnnnnnnnnnnnnnnnnnnnnnnnnnnnnnnnnnnnnnnnnnnnnnnnnnnnnnnnnnnnnnnnnnnnnnnnnnnnnnnnnnnnnnnnnnnnnnnnnnnnnnnnnnnnnnnnnnnnnnnnnnnnnnnnnnnnnnnnnnnnnnnnnnnnnnnnnnnnnnnnnnnnnnnnnnnnnnnnnnnnnnnnnnnnnnnnnnnnnnnnnnnnnnnnnnnnnnnnnnnnnnnnnnnnnnnnnnnnnnnnnnnnnnnnnnnnnnnnnnnnnnnnnnnnnnnnnnnnnnnnnnnnnnnnnnnnnnnaacccacatacctaggaacacctgatttttgacaaacaatccaaatatatacgctggaacaaagagagcatcttcaacaaatggcgctggcataactggatgcaaacatgtagaagactacccttagactcaagcctttcgccctgcacaaaacttaagtcaaaatggataaaagacctnnnnnnnnnnnnnnnnnnnnnnnnnnnnnnnnnnnnnnnnnnnnnnnnnnnnnnnnnnnnnnnnnnnnnnnnnnnnnnnnnnnnnnnnnnnnnnnnnnnnnnnnnnnnnnnnnnnnnnnnnnnnnnnnnnnnnnnnnnnnnnnnnnnnnnnnnnnnnnnnnnnnnnnnnnnnnnnnnnnnnnnnnnnnnnnnnnnnnnnnnnnnnnnnnnnnnnnnnnnnnnnnnnnnnnnnnnnnnnnnnnnnnnnnnnnnnnnnnnnnnnnnnnnnnnnnnnnnnnnnnnnnnnnnnnnnnnnnnnnnnnnnnnnnnnnnnnnnnnnnnnnnnnnnnnnnnnnnnnnnnnnnnnnnnnnnnnnnnnnnnnnnnnnnnnnnnnnnnnnnnnnnnnnnnnnnnnnnnnnnnnnnnnnnnnnnnnnnnnnnnnnnnnnnnnnnnnnnnnnnnnnnnnnnnnnnnnnnnnnnnnnnnnnnnnnnnnnnnnnnnnnnnnnnnnnnnnnnnnnnnnnnnnnnnnnnnnnnnnnnnnnnnnnnnnnnnnnnnnnnnnnnnnnnnnnnnnnnnnnnnnnnnnnnnnnnnnnnnnnnnnnnnnnnnnnnnnnnnnnnnnnnnnnnnnnnnnnnnnnnnnnnnnnnnnnnnnnnnnnnnnnnnnnnnnnnnnnnnnnnnnnnnnnnnnnnnnnnnnnnnnnnnnnnnnnnnnnnnnnnnnnnnnnnnnnnnnnnnnnnnnnnnnnnnnnnnnnnnnnnnnnnnnnnnnnnnnnnnnnnnnnnnnnnnnnnnnnnnnnnnnnnnnnnnnnnnnnnnnnnnnnnnnnnnnnnnnnnnnnnnnnnnnnnnnnnnnnnnnnnnnnnnnnnnnnnnnnnnnnnnnnnnnnnnnnnnnnnnnnnnnnnnnnnnnnnnnnnnnnnnnnnnnnnnnnnnnnnnnnnnnnnnnnnnnnnnnnnnnnnnnnnnnnnnnnnnnnnaatggtgccagatgccacaagagtaacagaactgtgctgtttttctgggattttgttttttatatatatatatatatatatatatatatatatatatatacacattatacacacatatgaaaatgtcaggtgcatctccctgtaagttggagggtagcctgatctacaatgagtgagtttcagccagagctacaaagagaggctgtctcaaatcaaaatcaaaacccccaaaattaccttagttataatgaaattcattattacattaattaatacatattaatataactgaaaaaaacactgagtgtgacagtacaggagggtcccacattcaaggatggcctggggtacagagcaaaaaacttgcctcaacacaaaggaaaacctacttgttttcagtttctcaatttttctgtgacaaatgcttactagtaggaagaaaaggatgagcattttcttcaaggtaaagaagaattggactaattactcaaccctatttcccctggaccacatttcatcagtaatgaataaaccaagttctgatgagcacaaaagaccatgatcaactctgacagcaaggagactgcgttcaaaatctggttctaccttttgatctcctttaaaatgagacaacagtatatatttgcttatataaatagcatcagatctccctgggataacaagagataccaacagcaatagttgccataaaaacagccaaggaaacagttgaatcaaaccaaaccaagggaaggggtcttcaatgaacacctttctgaatctgaatttttctaagccatgtaacatataatcatcaaaaattaacaactaggtatttcatgctgtcaaggtatcactgttaattgtgtgtgtgtaactatattaggtaacgtctgtaaaaagtcactatcagttggtacagtgcttgcctagcatgaaggaagccctgcttttgattcccagcactgcataaattggacatggtggtatatgcctgtgatctcagcactcaggatgtgatggctggaggatcagctgtccaagatatacagacagttcaaggtcaccatgggctacatgagaccttgaccaagaacacacacacacatgcatgcttgtgtattatatgccaagtgcagtaacacattgcattccattggaggcgccggggatcgaaacagggtttctctgtgtagccttgtctgtcctggaactcactctggagaccaggctggcctccaactcagaaatccgcctgcctctgcctcctaggtgctggcatcaaaggtgtgtaccaccacttcctggcaatgctagtattcttgctactcaggagaacaaggtagaaaagatcaaatgggcacaggctggcccagactgggcagcacagcatgactatctcgaaataagaagtcatcttgtagaacactggaacatataggatttgtctcaaagtaactcaaaagtattggggtgtaacttggttgggagcctatggtaagcacatgtgaggctctgaattcaaccccatcattagcgctccagcgtttctcctcaagaaacaccaaaaaaaaacaacaacaataaaaacccctgtgaagcagggagttaatggaacagaacagaacagaacaggccattggttgagagtcactgaagctgtgtggtaagtaaacagagattataggtgtgttcgctctacatttccaaatgtgaatttcccacaattaaagatttaacagtcaaattcaaaaaatattattaaagaaaattgcttcttttaaaaatgatatttttatgtgtatatgtgtatgcgacccatcgtgcgtagggctcacagatgataaacgaaggcactggatctcctggaactgcatttcaggtggttgggagccaccacgtgggaactgggaactgaacccaggtcctctgtgagagcagtaagtgctcttaaccactgagccatctctccaacctcttaaggaaacttatttaaaaataaattatcttatgattgctactaataatgatagtaatgaagatgctttttaaaaatatcataaatttagtgcccattatagtttgccaaataattttagttcctttttcatactccataaaagagtatttgatttagtattactcagctgttaaaaacaatgacatcatcatgaaatttgctggcaaatggatggtactagaaaagaccatcctgaggaatgcagacccagaaagacaaacacggtatgtactcactcataagtggatattagtagtaagtaaagtaaaggataatcaggctacaattcatggacccagagaagctaaataacaaggagggctcaagggggaacacatgaatgtcactgtgaaggggaatggggagagagagtactggagagacaactggaatggggtggacctctctgggaagagctagaaatctagtgtaatggaaactctcgggaacttatgagggtgaccctaactaagacttttgtcaatgggaaaaacagggcctgaaccagccatctcttgtaaccaggtgagatttctagtggagggattgggaccccaccccagccacaaaacctttgacctataatttgtcctgcctacaagatatgctggggtaaaggtagcacagaaattgtgggcgtggccaaccaatgactgctctagcttgaaaccccaaaccatgagagggagctcacccctgacactggctggagggccaggacctagaggtgggataacccaaagacctaggatagaaccaaacatgactggggggggggtcgtcaatgaaatgactcctaatgatattctgctacactcacagattggcacctagcccagtggtcatcagagaggcttcacccagcaactgatggaaacagatgcagagacccacagccaaacaacaaacagagctctgggaatcctgaggaagagggggaggaaggactgtaggaggcagaggggtcaaggacaccacatggaaacccacagaatcgactaacctggactcttagacactgaacaggcaaccaaggaacctgtatggattgacttaggccttctacatatatgtgacagttgtatagcttggtctggtgcctagtctcactgcaacttgacatggctggttgatatgcatgggaggcctgcccttttctgaagagaaatggatgaggaggagtagattgtggggcaggggggatgggagaagaggaaggggaaactgctgttgtaatgtacaaacaaaaaataaaataaaatgaaaaaaaaacagttaaaagttgactgagttctgaaggtaaagtttagtggtagagtgcttgcctatcatgcatgaagctctggtttcagtcttcagtaccataacacacacacacacacacacacacacacacacacacacacacagagagagagagagagagagagagagagagagagagagagagagagagagagagaaagagagagagagagagaggacctgcatacagctggcccagcaattccatttttaggcacatactcaaagaactgacagtgagtactcaaatacacatgtgttcacagcagcaccactgacaacagtctaaacagcccagatgttcactgatggataaaagggtggatacattgtgatatatacatatcatgaacattacccagccatacaaaggaatgaaataatggcatgccacaatgtcagtgacctcagaaaacatcatgtcaagtaaaaagaaaccatgtacaaaaggtcacatattaaatgatcctgttgatatttgtattcaagataaagccacaggggcagaaaacaggctagaggctggcaggagtctacaggaaggggaacaaggaataattgcttattgtatgtagcatttcattctgggggaggtgggaatgtcatggaacttcatcaaaggtgaagtgtgcagcttataaatatattaaatgccaatgaattattcactcaaaagtggttaattttatgccatatgagtgtgacagttggttttaatgccagcttgtcacaaatgacaatcacccaagggaccctcatctgataaattttcctgattgtcttaactgatatgggaagaccaaccccaaacatggtgtcactttctggcagcagcctggatttaagagcatggcagaggaagatcactgcttccctctcaagaactagttaatatactaccctgttgctgctgctgattccttctaagacaatcagaaccatttactaccctgttgctgctgctggttccttctaagacaatcagaaccaggcatccctcactaacagaggaccagaggcactctaagaatataccaggtttttggcactagattaggactgacagcaactgggctcagacttttatcttaatgtagaacaattacagtgaggaaaaaaacaaaacactttttttttttaaacttatcagcttggctaagtatcaagcaattcaagaacagcctgcactggataaggtgcaaagacagcaagtggcaggactagcaattgtcctgcaggtttaatccatcagagtataaaattcaaataccgagcccattgcaccctattattcaagagttatttgtagaaacaaagacctgaaataaaccaaatttgtatcaacaggatattgggataaattataatatgcttacatatggaatattatctatttgtaaatggaactgtccaacttttttgtttgttgtttttttgtttttgtttttgtttttcaagacagggtttctctgtattgttttggagcctgtcctggaactcgctctatagaccaagctggtctcaaactcacagagatccacctgcctctgcttcccaagtgctgggattaaaggcatgcgccaccaacacccagcagaactgtccaattttatatgtataggaatggaatgctttgtaaagttaattcaaaatagacaggcagaatagaatggtgcctactttatagacttccatttgcacaaactaaagaatttatttttttccctccttgtcccctgccccatgatgaggaatgtgtatgttatctctggaaggagactggcgacagattatcttaacgaaggtggctcaactggagggtagcctagactcacagtgagttcaaggctaccctgggcaaacttgaagagacctttgctgtgaaataatccttgtgtacactgtgtgaatatgtgtggctatgactggtttaataaacaagctgactggccaatagctgaacagggtcaagttgggggaaaaccaaactgtgaatgatgggatgaggaagggtagagtcagaggagacgcctgacaacagcagaggaggcaggatacgtagaaaacgcgataacaagccatgagccatgtggcagagtgtaaattagaaatgtggattaatttaagtgtaagagttagctagtaataagcctgagctatcagatgagcacttacaattaatataagcctctgagtggtaatttggaagcagctgctgggatgggaaaactctgcctacatatcttatctcaaaatgggggctcacccatcatatgcttgcttagtatacacaaggcactgaggtcaaccccatacaccactaaacagacagacattggagtagattagaatcctgtagggttttatttttgtttacatacctcaaatacagtgctctaaatcaaacagcctgagaagcatacagtaagaagttccagcaatgctgccaaacacttctagtaggtaagtactgcacagttctttgtatccttcagtttttatgtatactgcatgtaaacaaatgactgtgtagacttattcatcttccctgtcttacagtaaagtatcccatcctttctacccccactcctcacctacctcaactgctaaggactgaacccagggcctgtgataagcaagcaccctctaccactgagctacagtcctggacccacatttccctttttataatgaatatttttttgtagattttccagtctatagatgtattgccactcttttttttttttttttttttttttttttttttttggaaatggagcctatcctggcactcgctctggagaccaggctggcctcgaactcacagagattcgcctgcttctgcctcccgagtgctgggattaaaggcatgcgccaccaacgcccagctatcaccactctttttaaagctatcccatttttcattatacaaacattctgtaatgaacatgtgggctgttctggtcttctgttaccacaatgcttccatgaaaaaacattaggtatataccatgtctatagaaaggttgaaacatgcactagtaattttaattagatagtgggttttttgaacttctggatccaaaaaaaaaaaaaaaaaaaaaaaaaaaaaaaaaaaaaaaaaacgactaaagctattgaactttgtcctgtaacatataaaaaaaaaaaagacacatataaaatttacatcctccaaatggaccccagaggccctaataactgatgacatatagctattaagagtcaggtgatttaaagggggggctcaactacaatctaggaatgctgagagctctttaccttggttgatttcagctgcagaaggccccaagctcaagctcttcttctgctgagcatttttggcaagaagtgtgtgtttgtcgtcattccctgtgtccatctctgaaatggtgacagccagaatccggcagaagttagcaagctgctgctgatcgaaattggatactaaggaactcagattaggaacttcatctagccgaatcatttcctatagaagacacaaataaacaatccccatgctcagttcctcaagaagctgtgtgtcctccttgtcctcctcctcctcaggactcagcagtgagggccacgtggtctcaaaccccagcactgcagagctcagttgtgcaagctcagttacgatctgggatctctttctttccctgctgtcacacagttatacggaggctacatttaccctgtgagcacaactgtctccactgcctgccttagttctggcagcacattttgttccctttttaaaaacctaccattcaaattttataaatcacactgaaatctatatagaccctccaacaagtggctctagttaattcttttttttttttttaagattttatttattatgtacacgacattctgcttccatgtatatctgcacaccagaagagggcaccagatctcataacggatggttgtgagtcaccatgtggttgctgggaattgaactcaggacctctggaagagcagtcagtgctcttaacctctgagccctctctccagcccccccatttttttttgttttttcaagacagggtttctctgtggctttggaggctgtcctggaactgtctttgtggctgtcttgtagaccaggctggtctcgaactcacagagatctgcctacctctgcctcccaagtgctgggattaaaggcgtgtgccaccaccgcccggctctagttaattctttttttatcgctttactacatggtgtttgctctcctctatgcacacttaggtgaactgtaactcttcattacaactgaacgctgcagtgagcatctccacaggtggtccttgcatacatatacacagcatagagcttaccttcttggctttatcagacacacttccaaagttttaaaattaatgttcgctctaatttttaacaggaacactctatcacgtaaaagaattttccttctattcctagctgtatgatttcaggctcaccacacattcatacatagagaactaggctcatagggaagtgctactggaaggtggaggaacctaaggagatccttaggaaattaggagtaccctgctagaaggtggctccttctgggactcctttgtaaccaagggagacaagtataaaaagcccaagtctggtcccatcccagtctctttgtggctctctcaaactccatgctgctatctgccatgaggggatgcagccactccagttgtgctgtgtgaactttgaagctccagaactgtaagccaaataaacttcattttcttcccaaggagcccatgtcaggtgttttaaaaaaaaaaaaaaaatgcttctttctgggctggagagatggctcagtggttaagagcactggctgctctcccagaggtcccaggatcaattgccagcacccacatggcaattcacaattgtagggagacaccgtaaccatgcctcctaagggctggctacaggtgtgcttgaccacgccctgacaggcatggtcgtgtgtccctacacacaactgtctgtaactccagctccagggaatctatcaccttctgacccctgcaggcactgtatgcagttggtgcacatacatacatacaggcaaagcactatacacataaaataaatgaacaaaatgcttgtttataatctcatgcttccccgtctttaaaatcagtgtgtacacgccatgagcttttcacattttaaaccatcacacattctacagacagcacctgctttctctcaccccactcgtcaacttctactacgctggctatttttctgtctctgaatagaaatgtttatgtgtcctgtatctatttcccaaataatctgacactaggccttgtcttttctttagagccctattgcacagcacctggtggcaaagagctcagtaactacgcactaatcaggcaaatgattcctggacgtggtgatgaaagacagtggtttgttaagaaggaggcctttgggaacagctgtctgtcctctccccagtcaggcacacggatgtcagctactactgttaccagcaggtactctttcagtgcctccagtcccccagcccatctaactcagtgtgtgactcttggcttctccatccttctagccctgtccaactcagggtgtaaccaggtttcaccaccccacacccactttttattgttgttggttatgagatggggtatctcactgtaagttgggcttgtttaaaactcatgctgtagcttaggctggacttagacttgcagtaatccccctgcctcggactccctagaataaaggttacattacactcagcttcactaacttttaatatttgacacgttataaagcataatgggctttttcactgtgtgagccgctgtcaggtgagcactgctattaattactttgtcattaagaagttttacattttagctttctgaaaacggcaagcagcctacagtactttgtagctggcttgatccctcagtcacttctctattcagctgtgttttaacccacagcaccagtcatgtctaacactttatgatactcggtctgtgaggagatatgggtcatgggcttacttttagtcttctactctcaaacagtgctaccctaagtactgttgcttgatgcccatggagaagttttcctagggcagtagccactgaagaattctgaacaatgacaaatgttttccatcacaagccaataaaatgttggggaaagaacatcttcaaacaatatccttgcatgacacacttgaatgtgtcccatgtagctgacagacagaccttctgggtctcctctagtgttctcatttctttttgtgaatgtatgtgcacacatgttcacatgtgtgtacaagtgtgtatgacacatgtggtggccagaggctgatgtcagggatcttactagatttcagtctcttgtttattgaaacatgacacttgcctatttgccttgctgagctagccagcttgcccagggtcccttgcctatgctttgtacaagtagggaccaccctgactgaccacttggtttttatgtgggagtcggagattcaaactccagttctcacacttgcacagcaagtgttttatccagcaagccatttccctagtccctagtatttgcacttctttaaaatgtttttctaattacattttattaattgtgtgtgtgtgtgtaggtagatatgcatgtgtgtatatgaatgtgtgtgcatgagtatgtatttgcatatgtgtgtatatgtatatggtatgtgtgtatatatttatgggtaggggtgcgtgggcgcgcgcactgtagttggatttttctttgggccaccagttcacaaataatgacatggagtcttatgaaagtttagccttagttcaggcttggttggtggggcttttttttttttttttcttcttgagacagagtttctctgtgtagctttgaagcctgtcctggcactcgctctgtagaccaggctgacctcaaacttacagagatccacctatctctgcctcccgagtactgggattaaaggtgtgagccatcaccacctggctttaggcaagtttttaactagctcttataacttaaattaaccatttctattaatctactttttgtcatgtattgcctatactgcttcctgtgtctccttgccccccccccccacacacacacacaagactagattcttccttctacttcctctctctgcctggaagtcccgcctataccttctgcctagttattggcacttcagctttttattacaccaatcatagcaatgcaccttcacacagtgtacaaatatcccacaacagtgtgcatgtgtgtatgtgttatgtgtatgtatgtgtgggattaaatgcatgtgccaccaccgcccagctaatcttttgtttgctgcatgaattgcaggtaccttttcgaagccagtggttcaagtttccactttagttttacacattacatcaaggcacccatacaatgtagtagaccctatcaccaatttagatagataacacaaataggcacaagaaggcatgagggaccaggtgggcaaagctgggaaggagcaatcactgtctcctactctgagaaggccaaggagcaagcagctcctgcattggcagccattctcacacactggattgatcacacgattcttggaaaataacaaaggcactttgtcaaagagcacaaagggactgtctggggcctgtacacactgagaatgtgttccacagacaatgggccacttgagattttctgtttgggtaataacaggcaaggtctgcagaaagcagaagtaaaagctgggtgacagtgtgtgtaggtactctattttctgcaacaacaacctcaaggagactatacagcaataaaaagaaatccaccaaccagcaacagtgaggcgtggataggattgaggaggtaaactccaggtcctaacaaccactataccaaaattccaacatagtgtatatgggtatatttttggaagtttatgtgtttctgatgagaaaactttaatgttttcatctttttgttgctgtttttagagacaaagtctcactatcatccagataacctcaaacatgtgatgcactacacacaggataatagttcagttgtagaacacttgccttaaatgtgcaagaccctaaataccactaaaaaaaaaaaaaagaagaagaagaagaagccaggtagtggtggtgcacacctttagtcccaacacttgggaagcagaggcaggaggatctctgtgagtttgagactaccctagtctacacagcaagttccaggacagccaaggctacacacagagcaatcctgtctcaaaaccaaaacaaacaaacaaaaaaccaaaaaccctcagcaaaatacaaactaaaaaagaaagcaaaaagaaaggcagggtttcagtgcttatgttcaaggcaattaaccaactataacagaagactgataggaaaataaaaaggtagattaaaaaagcaaaggccactaagagaaacatacatggatctgcctaggaaggaaaacagacaagatctcctgagtaaattgggagcatggggggcaggggagagggtggaagaggaaaggggagggaaggggagtagggggaaatggacagcttaataagaaaaaaaaaaggtaagaaattgaattgtaataaagatttttaaaagttaaaaaaaaaaaggcaaggcaaaggccaaacattgccaccagagagaacaaaactagtgaataaaagcttcacagatagctgctgtgtgagcagtcaccagtgcacacaacagaaaagctgctcaaaagaactcgtaccatgaaagcgagaagcaattttatcttagcaaggaacactaaaaattcaccaaatcaacgtgaaattttgtgttttatactgtttgacttcaatttatatatgtatttatgtttcacagccataaagacccatgggcataaggaatacaacctaattttatatctgaatctatctaagaataaagaatttaacattggggtatggaagagcttcttttaaaggatctctgtccagtcgttaaccaagctcaacaatccagtaccttcgacacactcccacagcgggagaacacagctcacctttttaacacccaaaatatcttcgatgagtgttgctgtttgtaagaacgtcttcttacttgtcatcagtgtaaacaggaagatcacaaaatcatttttctctgccaaacgttttgttactccttccgtctgtcatagggagaaggcagaaaaggcagaattcttgtgaccacaacacaaaacacaaatagcaaagcactattccagatgcagaaagcaatcccatcctgaaaaactagcatgagccaacaaatataggaagttgcatataccgtgaggaaaacgtgaaaaaaaaaggactcctggcactcagaccacagaacagggagactactttggagctaggaatgagaaaaaaagcagggaaaaaaaaaaaaacagcttcacctagctcatgaagtctaagctcataaggctccatttggagagccaacctgtatcatctggacaaaagcccattgactaatgtgagccatcccacccagagcatccaagctacatgcttatgactcgtgaggcgatgacgcttcataagagggtcaaaactaaattcgaattctatctaggtgaccctgagcaaatcttttctcacctttggatctccatttcttcacctgtacaggattctctcaagagcttgggaggattccaacgagagagcgcagtaaacactctcatttaaccgttatcttgaagtcaaagtgatcttggtgcaaccaacatgcttagtttcctttgctatccattaactcacttttctgactgacactcaaaggtcgttcaaacgggtgcacacacagtatctgtgagggacaatcaatcccccagaggcagcctcactcagggcagcctgtcagcagcctcactcagggcagcctgtcagcacttctactacactcttcttcccttgaagcacacactacccaccaagtccccatctgtcacaaccatttagaacacaggaacaagatgagtgtctgctggtagagaacatataaatcaagtatgctttgcctatattatgggacataccatcaggaaaataatgtagctattctttttgccttttgcagaataaaaaagcttgccatgaaatgtggcttctacaaatagcaacatacagaagtctgagattatttgtagaagattgctggtagttgtttaatctgcttaatggatctcatgggatttacactctgcatctcatctatggttgtcattttctttagtcaagaatatgctttggggccagcaaaacatcttgatgggtaaaggcacttgccaccaaagttttctgacttctacacatacatacactaacaaaagtatgtatatatatgcatatataataaattacatatgctattattcataaattgttgtcaaagatgggaacaggccagcaatgtaccaagtcctccacaggattccctctctgtggagtctcccctaaccactctacacacaggcacgcttcttcctctgaagcctcaccctagtctacagcgatccacaccctccaccgaaggggacctccatccatccctgagtgatgtcacagaggtgttctagcttcacacctctgctctctacagcagacctagctcatgagacttaaagactagaataaaaaacaaggggtaatgaaggaataaaaaaaggactagctggcaaataacctcagaagtcatgttcaagagtttggattttaaactggtgagtgggtactccaagctaagagaaactcataatcggtgaggtaaacttgacaagtgaacttaatcttcaaaatgaagagactggtaaaaatgcgccgagtctctcaatggcctagaattcagcaagtcatctaggtgggctggccagtgaggcctaggaacccacttgtctgcctctcagcactatgattacaggcattcgacaccacacttctttgtcatgtgggatcaaattgagggccttaagcttgtgtgcgaaacactttatcagatgagccgagccatctctgtaaccttaagtttttaaagagcaactgttttattagaatgtctccaattaataattaggttacaatctaaaaacacccttgtagtaaacttgacaattactgagtcactctctttcatgctgtcttttttttttttaatattattgaactttagctgtaaaaagttgagcatttttgacaattagccttttgtcttatagatcttcctgtgctgttctgtgctaccagctgtaacaacatgagcacctgaaaagcagctaatccaaacaggcacacacactccatgtgaaacacactggatcctgaaagctcgatacaaaaaaagtaaaatgtctttaaaaactattggaatgataatatttttatgagatgtgttaaataaaatataattatcaaaataattattctcttatttcaaaatagtggctctaagaaaatgtacaataaccacacagcttgcattataatctatggcacgtggccatcacagataccagtgacagttcgctctctgtgctgctggccactaagaagctggaaccacctatgagacactcacgactatgaccggcattttctgtccgcccagtttctgtgcattatgtacccaccctttattatccctccctttcgtatctacttctccatctgtggtcttagtagtattcccctgcaatcttccttagaataagacaagaaacagttaaatgtttcttttgcttccacaacagaggtttcacttctacagcatcacttagcttgttctaccatgcactgtgacaagtaagtttactgtaagttcctaaagtcagcactttgcctttaaaaaccaacatttacacactgctttcaaagtatgttcacactgtgatctcacttagttctcacaaacactctgtggaccaagctcagggagctgtattaagccaacagccagggtacaaaaatcaacttccaacagtaagtgcttagctcttttctttcttccaaattgcttccttttttcaccattcctcttgacacagtggtcaaccccacagactgtcgtattcaataaatgggtaggaccactggcttttgttttccagtataaatgaaagaaacaggcaaaatggagctaaaggttatcttaaaggacatggacactctgccaatacttgtcacccttcagcaagtaatagcctcggcttggatatccgaggagatgggggctggctggctatggagtttggaacctgttgaaatagctttagctctaatcaagtgctacaaaaattctctctccattatttctacctgctggtcctgattctcaggcacacagaacataagggcaattcccttacatatctgaagacagttcttatgtctgccaccccacacaaacattctgcctcactcgtgaagataaaggcagaaatacacagacactaacagcagaaatactcacacagacacaggtattgtacaggatgctcaagcagtccttcgacatctcgtcactcactgaaagggaaggaggagtgttatttctctctctcacaaaaaaaacacaatgcaacgctagcacacactggaacataagacatgttctagctgggcgtgctgcctgcctgcagtcccagcactggagaggcgagtgctgcgcaggcacttagactacgccactttaagtgaacacacgagcacctcaccacactgcagtgccaccagaaaaaagactcaaggtatattttcagcatcagaacaactacagtccagagtgtcagaagcctgaccaaattttctcagtatattcccattgaaaatctgctagcagaaaataagggcatcatttcttcctcagacttaccagctggattttagggtttcttgttgttacagttatttatattaggaaagtggcttctaatgtctgatatactgtcaattccaataaaggaagaactcactatttatctatgaccagaacaagacagtagcacaaaaaggaacttacttttatgagccccaaacccagagatgataaaactgagtatgagccatggtagagtgctttatctggtgttgcacttatttttaaaaaccaatttccattcatttcctcacagccataaactctaacatccacatctcccatgaggtcccaatgagtggccctggaaggctagcatggctggacagatgggtcactaatctccttttgactatgtaggtatgtggtgtgtcttattactatctctctacctatttgacagatttttgccttgcatatttatttaatgaattcagagtagaacgaattaaaatattttagtagttctcaactttccctttccaaagggagttagattcatgcattcattaggaatttgttcactaattttaatgtggtgttgcaagcaaaagaggaagagaagtcccactcctcatggtacctacaaatctattgggagggggagaaaacaaaagtgaccaacaagccattaaatcagtgaatctcagccagtgggtcacaaccctgggatggggggagtcgaatgaccctttcacaggggttgcacatcagatatttaaattactatccaattcataacagcagcataattacagttatgaagtaacaatgagccgagcagtggtggcgcacacctttaatcccagtgcttgggaggcagaggcagacagatctctgtgagttggaggccagcctggtctacagagcaagttctagggcagctagggccgttacacagagaaaccctgtctcaaaaaaacctaagtaagtaaataaattaaataaaatgaagtagcaatgaaataattttatggttggcatcaccacaacatgaggaactgtattaaagggttgcagcgttaggaaagttgagagccactgtattaaaagatgctacttgcctccagagtagaaaagtgagacattcaaaaggagcaagagaacaggacatggtgacacaagcctgtaacatcggtacttggacagtggagctccaagtacagtgggtcaggaaattaaggtcattcccagccagcctgcctcacccctgccccaacaaaaaagaatatgaattctctggccactactggagtctcacacagtagtacatcatattgatgtaggtgcaaatttaaaatgtttctatttattacacattcatgcatggattttttttgtttttgttttgttttttgtttttgtttttttcgtgacagggtttttctgtggctttggaggctgtcctggaactagctcttgtagaccaggctggtctcgaactcacagagatcagcttgtctctgcctcccgagtgctaagattaaaggcgtgtgccgccaccgcccggcttatgcatggatgttaactgtagtgatctcaggcttttaaaggcagagtgaagtgtacctttaaggtagaatttttaataattaaatactgaaacctaaaaaagaatgcatgtcacacatgtaagttgcaaaaataatacaacaactaaacctatcacccaacctaaaaaattatgaattatataaacactgactttttgccatgtatgactctggcaatggctgaacttttttcttattcattcattcattcactcattcattcattcacttatttagaagcaggttctctctttgtggccctagctgtcctggaacttactctgtagatcacactggtatcaaattcagagatctgcctgcctctgcctcagaggttgggattagaggtgttgcaccaccacatccaacatgactgaactttttacaagagcataaatctcctttataacaaaaatctgatgggttgatgggctgtttaaacaaaatgatcttaccaggcaatgtattagtttctcagaaaacatgtaacaaaaaaatttctaaagaaaacaaaagctggatcaagtcactattagaaagtacaaagatacaacttttttcaaaccagtggttttcatgttctttcttttaaggtaccaagtcttcatttctaacaaatatacaattgatgcagcatgttgctgagcttgggatggatggagcaagctctagggctgacaactggatatgctctcatgtctcaaagaagagagcagctcctgccgatggccaccacacctgacacattgggacaaggaccagaacctaacaaacatacttactttttagtttctgtccccggatagagatcgtaggcctcataagaatttctacaagaagctgaaaacaaaaaaaattaaagatcttcaaatttaattcaaagcacaactcaaaaaacagtttttattacaaacacttgtggtccaaggacctatcacaaaccttcttgttcaaaagaagcactttagctagagctagacccctcgagggccaggagagggcactggatcctctgacaccaaaggtatagaagctgtgatttgccatttgagtgctgggcacagaatctgagtcctctgcaagagctaagaaacactccacctctgagtcatctctccagcccctaaagaacatctcttattcttataacaagggctttcatttgtgaagttgcttcctatttcagtatttctgttatttctgagacacagtctatctgagtggcccacactaacctccagctcatgatccttcagcttcagcctttcaagtactgggattacaagtgttcacctccagcccactttctacttaaacatattaaaatattttaaaataatctctgtgctaacagaacagctaagtctatgtatttaaagacattaaccataagtaggtattttgttgtttaagtcaaatcaggaatagttttgaaacagaatccaaatgctctcttaaccctttccagctacaagccactactggacagcacagcagagacacctcaagccaactgggggaaaaagatcccacaacatttttaaagtttctgtttcttctcattgtttttaacaccaacaggcagcctttaagattagcgatcagctgagggatcatctcagaccagcaacaaatcttaagaaatccaatccatcctaacgactttgggtgctgagtgactcccacgtgcagaactgagggcagaggctttggcatgagacagtagctgacaaaatgaaaaccctcagcacctgtaccagactcacttctggagactcacagggcttggctttctgcacaaccacattaaaagctaactgcactggtaggagatgagaggacttgggcaaaccacaaaaggcgctctgaaggcagccttctgctctgtgtggcagagtggtaggttgtgcctacctactactaccctgcctccagccctcatgtcatacagtttaaagtttaataatcagttgtgtgtggggggcggtgcacaggtgccctggcatctctggaagtcagaggacaacttgtggtaattagttctcttcttcactctgcaggccctccatcagcctacacttttcacaagagatcacaatccctgagctctcaagatgtaagatgctcagatgcaccaagtattttacctcaataagctcagtgagaatacaagctaggtcaatgagtaagaggccctgaatgccaagcaggaccacatctgaccctcaggcatgcttcatttgacacatacccaggattcctaatgctcctgctaagggtccagctttgtatggattctagggactcaaactcaggtcttcaagctttctagggcaaatgatttttacccactgagccatctccctagcctccgacacacttttctttgttttttttttgtttttgtttttgtttttttttgtttcaatgtgtatgagtattctgcctgaatgtacactgcacccatgcagtactcatcgaggccagaagaggtactggaatccctggaaccagagttatagatggttatgagtgactatgtaggtttcagaatcgatcttggatcatctcgaagagtaatcacaacttctgaactacttcttcagctcttcctatatacatttcttgataagcaatttaaaagtagagggtatgagtgtaaaagctaccggatcacaataactggctaacagggaatgctgagcaacaatgaagaacaaagggggactgggagtaggagtgttggtggtagagctcttgcctagcatatgcaagggttcggttctatcaggatggagggagaaaggatgggaatgggaaggccaggcacgataaagacgggacactcactctttagtttgcaatggatgccattgtaaccaggcatggtggcacagggttagaaccatacttgggaagcaggaggattgaaaacccaaggcctgcttaggttacagagctagtgcaagaccaatctgagtaactaaatgagacactgtctcagggataaacaagaagaaaatggcactttttaaaggcaaaattttaagttaggagagtcatacatacctataaccagtacttagaaggtagaggcaagaagatcagtgagtcaaagccatcctcagctatacagcaagttggagactaacttgggcaataggtgaccttgtcttaaaaatccaaaaatagctgggcagtggtggcacacacctttaatcccagcacttgagaggcagaggcaggcggatctctgtgagttcgagatcagactggtcagagcgagtgctgggaggcctccaaaaccacagagaaaccctgtctcaaaaaaacaaacaaacaaacaaacaaaaatccaaaaataaaggaacccaactcccccccaccaaaagacctaagtttgattctaggcactcacatggcagctcattaactatctgtaactcccattccaagggaccagaaatactactatggcccccaaaggtactggacacccatgaggtgcgcttacacatatgtaggcattcacacatacacataagttttaatgaagtaataagtaaatgaatgggctgacaaccaaactaaaaagacaaaacagctattaacagataattgataagaaaaggaattacttacaaacacatgaacatatccaatctcactcacacaaggatacacatttttattactattaatattattttgtttttgtttttttgagacagggtttctctatgtagcaaccctgactgtcctgaaattttctctgtagaccaggctggccttgaactcaagagatctgcctgcttctgcctcctaagtgctgggattaaaggtgtgagccaccatgcctggcttattattattataatactactattattattttggttttttgatacagggtttcgttaggtagccttggctgttctggaactagctctgtagaccaggctgtctccaattcacggagacatctgcctgctgctgcttcccaagtgctggattaaaggctcgtgccaccaccattcagctaaaaaaaatttaaaactatggagaaaatacataaagaactttacatcttaataataaaaaagagaaaacccaatttgaaaatgaaaacaggagatgacagtccttgaaagacttgtcaacatcatcggccatcagcaaaatggaaatccaagtcacagtgaagcatttcactatcactagaataggggtaatagaaatgacagatgataaaagtattggtaaaaacaaaagagaaacctgaattttacacacagctgacaggagtatgaattagtgcagcctctttggaaaacagtcaaccagttccctcaaataattataccaagttaccatgtgacccagcaatttcacttctaagtgcatacccaagagaaaggaaagcacctatctacacagaaacattcaagagtgttataagcagtactcttcattacagtcaattgtccatcaacaggcatagacacataaaatgtgctacacagccatacagtggaatatcattatttggctacacaaaaaggagtatttatgcatgcttcacatggatgaagcatgaaagcactgtgctatgtccaagaagccaatcataaaagaccattggatacataattccacttacaggaaatacccagaacagcaactatactgtcaaaagggagaccaatggtcgccgtggcggcagggaagtaacttctttggggcatgatgaaaatattctaaaactgactgtaacgatgcctctgaatacaatgaactgtacatactacactcaaccttagccaagaagtgaagaaataatcaactatatactttaaaagggttatggcacctgagccatagctcaataaacccagtttaaaaaaaaaaaaaaaaactgaaaagaaatgtatttttttctttttcttttcctgtatctgcttagtaaagacttgaaacacatagggaaaagggctcctaggtgctggcatgggctctttctttatttgagcagcaggacaaagaggaacttattttgtggtaattaccagtgtgctcttctgtatcaaggctagacttttgtaatatgatgctcttgcagaggacccaagttggattctcagcatctatggtgtagctcacaaccatccactactccagttctagggtcttccaccctctttctgctgctgcaggcaacacacatggtgcacagaaactcatgcaggcacacacattaccacataacacatataaataaaaacaaataaaacctcaaaaaatacacagaagggaaaaatgatataatttcaaaataaaagaaataattcctaaaaatacagatatatacagcatgtgtatgatgatatgggtaaaaagatactcttacactttgttcctggaatttaaactgataaaagttagtgtaaactgcagattaataaataaaagacatacaagctttggctccaaaagtccataaaaaaatcttctgcaatcttgtttgtaataaaaaaaaaaatgtggccaggcgttggtggcacaggcctttaatcccagaactcgggaggcagaggcaggcaaatctctgtgagttcgaggccagcatggtctccagagcgagtgccaggataggctccaaagctacacagagaaaccctgtctctaaaaacaaaacaaacaaacaaaaaaaatggaaaaactaaatgttcaacctgggcctcagcaaatgaaccatgatacaatttataccaggaaatattagttggatatttaaaatgccagatttaggtgtacagaaatgaaactgtacccacttagtaagttacatggaaaaaaacaaagcataagagaccaaactggatatacgacctggcagtgcatggggggagaaaagaaactaagttggagataggtccttcagcccttcagtcccaaataaacacacggaggcttatattaattaaaagctgtttggcctattactcaggcttcttactaacaacaaactcttacaactcaaattaacccacaatccttatctacgtttagccaaatggcttggtaccttttctcagtatggtggtctcatcttgcttcctctgcgtctggctggtgactgtgcctctgcctttcctctttccagagttgtcctagtctggtcaccccacctggctactggccaatcagtgttttattaaaccaatactagtgacagatctttacagtgtacaagagcattagcccacatcacgtttgcacatgcatgtggacacaaacaagagcatctctgggacacgtgagaaactagtaattacaatagcgagacacactatagtgattcaacaaaagaaaatgccattcatctcaaagttaaaatccagaccagagagaaggcacagcagagtaaggcacaggtgacaagcctgatgaccttggtttaatccacaggacccacatggtggaaaacacacacacacacacacacacactaaatttgaaatgtttgctataaaatctgaaattctttatgcctcccattttaattctcacatgattaaagtattaatagtattaaacagctacttacatcaacacctccaaacaagtcaaaaatatatgtattaggatacgtagcttcttgagtaagtttcctatcttcagttacaaatgccatagcctccatggagagaagaggggaaatctcctggttcaaaaaagtacagattccgctttagaatttaacacagactagaaacatccaaatatctaaaataccactaaaatatgcattttagctgcaaactgaaaccccctgagcacaaagctaggcctcaatgaagcattagggacccctagaatccttttcccatggaatctggctagtgtgactgatgtcaacgaacagaatgtagagaagtgacaccgcacacttagacataagccttacaaaggccaagcagagttggctactgtagaacctcactgtcatgttgtgagcagccccctggggaaggccaggccatgcatgcatccttagctgacttccagcagcaacacaccaggcaccagtgaggccatcgtggaattctgcacatctttaggccctacagtaaatacacaggaagcagaagaacttctggctaagagaagatggtgattaccacttgaagttactagatttcacaagaaacagctggttctacagccaaataaccaaatctctgctggactgtgacctcctgaaggaagtcctcagtgacttctccaagtcaaaggcattctgacagtcttccacgaccacccaaaggaatctctaagtcatttgtgacatttagcactttactttgcaactatttacaaacctagggttttcttcccttgaagacaagctccaacagattcttgtttgtttcctcctctaagtctcaaggcagaggaggtgttcagcatggtaggtactcaaaatttgggaggggcccagcatcctttgttcataaaacatacgtaacagacagaaaaacctcacagcatgctgccttacacagtgtttttcaagtatgtatttacaggatgaagaaagtcaagatcatacaccatggtcacctgagtactaatttcccaagccttcaattttacctcaattctgtaatttagagatttggcaggaattaaatgtaacaaattttttggaaaccacatttagtttttttgtcttgtactgagagacaggatctcactgtgtagccctgactgtcctggaatcatgtaataaatgatggccttgtacttatgggggctctacctgcctttggcctcccaaatgctgggagtgagtatgtaggcaccacacccaacttggaaagcattttaaggcacatatagaggagctataattacttctatcaaccagactgtgaaaagatgaagaatatgtaatatctcttcataaagggaaaaactaggctgatttaataaggatgtttagaatacacctggacagtcattaacattttacctctgaagagtactgcagtattcagttttattatgaccacaggcttacacaggttgtaactgtagctccagctacttctctaaattcctgtttggacacagcccccaagtcagaaactttgagtgtgggtagcattgagacacactcaagatggagaacaagtatctacaccaatgtcattgtactcgaaacctaaccagcaatcctaacttcaatccaacattagtgataattaccaacagccagaaagccccttccaagagccttcagtgatatgggtcatctaaggttagggattggggtaggggttcagagtgtacaattctaacctagcatgtgcaaggccctaggctcagtccccagcaccacaggatgtgggagtgaggacacagtgcagacttcccacactgctttaacagcttccacagaccaacacacaccttgattggctctggagatggaataactaacaaatattttgtttttcaatgcttctgctgaacttctccaattttctacagctcacaaaaaaactggctgtttttaaaaggccaaccatttgaggatgtggagacctgagcacaaccttctaaggcctttctgagttaccttgaggatgttttggcactcaatgaagtcactgtggaggtggctggtggcatgcagcttaaggagcaactgaggaattccactccatttggacaatttgtccctctccgtcaaaaaggtctcagtgaactgtgaatttaaaaaacaaataaaaacaaacattttactggcaaggaagtagttttggcaaaagagagcagctgattcccaaaggcccaggaagataattttttgtttgtttgtttgtttgtttgtttgtttgtttcaagacagggtttctctgtgtaacagccagggagacaatttaaaagtggctctgaagaactcttacaagccgaagcctaagccctctgctccagatacagcaccattctgactccacccttactcaccagcttcatgcttttcccagtgcacactcaagcctccaaattcagctgtgttctctgcccacaggctctctcccagtctttactgtctgaaatgcttgttttccttcaaatgccaaacaatgagggccagggagatgacccagtgggtaaggctgctcgctatactagctgataactttgattcctagaacctacataaaggtggaggaagggatttatcaacaccatacactgtcccctaacccccaacatgcacatcacagcacaggggtgcacacacatatttaataaaataattaaaaattaaggaaacttttatttaaattttaagttactatttattttatgtgtgcgggtgttgtgcctggtacccatgcaggccagaagagggcatcagatcccttagaacaagtctacacagtgagttccaggtcagcctggactgtagaaaccctgcctcaaaacaaaacaatacataacaaataattagatacaaaaagaaatcatgagctgggcattggtggcgcacacctttaatcccagcactcgggaggcaaaggcaggcggatctctgtgagttcgaggccagcctggtctccagagcgagtgccaggatagactccaaagctacacagagaaaccctgtcttgaaaacccaaaaaaaaaaaaaaaaaaaaaaaagaaaagaaatcatggcaggagttggatagaggttaagagcacttcttactcttacagaagacccaagttcagttcccagcacacatgctcggcagttcacagctgtttataactccagttccggcctctgccggcatgcacacacatgtggcatacattcacatacatacatacatacatacatacatacatgcatgcatttttagtgcaggcaacagctagaaaccttccttggttggccctccttcctctccttcctagggcagtggcccctaattaggggcttcacctattatatagtttaacctattgtacatagttcccaattcattggagccgttctttctctggatcactacttcagagcagataccaaactgtgaaaacactcactcactcttacttttattcaacttgcacagagtaaggactcaataaatgtctgaaggctctggggcagtggtggcacacacctttaatcctagcactcctgaggcagaggcaggaggatctctgagttccaggccagcctggtctatagagcaagttccataacaggcagggctacacagagaaaccctgtctgaaaaacaacaacaacaaaagtttgaaggcatcaacaaaagcaacagcacaatgacagaacatgagtagattatgaagattttcactaacatgttactattacaaggaccagacaggaaatttttgtggttcaatcaaattaaaagatcttgttatggtttgtgctgagcaaacagaccttaaatgtttgggttaatatgaacaggaatgccctgtgagatggacaagtctcataattctttctacatttgtgtcttagagattatagcatgagggataacagaaaatgttcaaaagaatactttgtcttagggtgaaacacagaaaaatactacttcttacaacaaaaatatctgtatattagcaattttatagtgctcaagctcaaaatcaatatgtggtgatatattgtttatgatctaataaaggttgcctgaagatcagaatgcaaagctagccacagtcatttaggccaagcagtggtggtacacacctttaaatccctgcagccatactagtcacagaggttgggcagtggtggtgtatgcctttaactccagcactagagaggtatacaagacaggagctcagggtctcattctgtattcagtctgatgctgaggatttgtaaagccaggatcaccctttcagtctgaggtaaaggtaagagtggctggctgctttgcttttctgatcttcaggcaagcttcattatttattgattgattgattgattgattgattgattttttgagacagggtttctctgtgtagctttgtagaccaggccagtcttgaactcacagagattcacctgcctctgcctcctgagtgctggggttaaaggcgttcaccaccaccgccaagccaggcaagctttattagatcataaacaatatatcaccatacaatacaagcttctttaaaaaaagtttagaaccccctttcttttccttgagaagcaaagcaagcacctacagcttcaagacctgcagaagccatccctacaggatactatgtgagcactatgacactagagggctttaaacctgctgataacccaccatgagaaactagggaaataaaacaaacaaccccctccaagaaaaaacaaaaactgaacagagatgggggaagtgcttctgtgtatgtgtttgtcttactggataataaataaagtactgtttggccaatgaggcagcaagttaggcgggactagggatcaaggaggattctgggaaatgtagtaaagaagtggtgatccacgtgggaagtgacatagcagggagattcctaaaacaagggcaagaaggaagtggacccccttctctcttcctcctgggctctgctctggagtcaccatgtgactggcaagagcggaaggcatcctctataagataagtcttataaaatatacagatttatgataattaagagtgagctaccagatgagaaatcctagtcattggccaagcagtatttgtacctaatacaagtctctatgtattatttggggtcctaacacggcgggcagatctcgggcggctggcagaaagcacccacatggcgatagggctccggtggcttttgggcagaaagatttatcataacaaaacagggcagcagaagtaaagtaaattaaaagcaggaaactacacaaacatcaacaaaactaaaagtttcaagattttttgacaagaccaattaatgcacaaacttttaactgcagctactaatgcctggctaaaattattgaattcaggaatgaatgagagaatattactgccagccttaccagagcagaagagagtatagtagagcactgtaaatgaccatatgtctacaaatgaccatttcctaaaggaaatgactaggagaacacaaactgtgaaacaaagtatcaagcagacctacaacacccagcagagaagtggcattaaagatgagtcacacagcaatggccaacacctccagaggagagtcctggcccagatcaatggaccaaacattgaaaggagcattaacacaaatactcagattcccacaaaataggtgaggccagaattctggtaacaagtctagacaaatacagaagaaaactacaggtcacacttaccaatatagatgaaaaaacctagcaacacatatggcaaaagcaaacaggattgatttatcctgggaaggaaaatagttcaacatatcaactttaaaaaaccaacagactacaggacacgctcaggatatatcaaaagacagatgaaaaatggcaaaagccaaacacgttttcatgattaatactctgcacaaattagaaacagaacggaactttctcaaccagctaaaggcatttataaagagtctaaaattaacatcaagcttattagtaaagactaatgttttcctactaagatcaagaagaaaagaagactcaaagatgtctgcttttaccacttccatttgactatgtagtagaaacacgaatgtgaacaattagacaggaaaaacaaagagcattgaattggaaatatggaatactctattcacagatacaatgggatcctgattatcagttacatttatagtagtatcaaaaataagatgtttaagaataaatttaacaaaagcagtttaagacttatacaaggaaactaaacactattaagatagtaaaggacacccaggacactgaggcaggagaatgtcaagttcaaggacaggctgagttatacagtgagaacgaaaaaaaaaaaaaaaaaaaaaaaaaaaaaaaaaaaaaaaaaagacaaggaaagatatctcatgtttaagggatgggaatttactgaagtggccataccttccacactgcttactgttactaaagcaacaatacccctgcactgttgacttaatgtaattcctatcatggcctagttgtcttcattgtagtaacataatttactactaaatgtcacacaggaatgccagggacccgtaacggttgaaacagccttaagttggaagaaccataattcctgaatttctgatttgtaactttatcacatgtctacattaatcaagattgtacaagctaggtgatcatgttagaccattggaatagcaatgagattccctaatggttaatcaatatttgttttggggttgatttgtttgtttgttttggttaggtttgtgtagtcctgactggcctgaaactcactatgtaaaacagtttggcctcaaattcacagacatctgcccatctctgccttctgatggctgggatttaaagacgtgtgtgtcaccatgtcctgaggttaattggtttttcgacaagactatcaaaaccacagaacagttttctcaacaaatgatactagtacaagtgaatatctctaagcaaaaaaaaaaaaaaaaagactccttgggactggagagatggctcagtggttaagagcactggtgtaggggaagctggatacctctctcagatgactttagggtttagttaacatagatagttaggatgtgacataaacagattgttgtatcttcttatattttacctgtatgattgtttattttggatactttaaactgttaagttttaatcctcttttagattaaaaggggaattgtaggggaagctgtagccacgcctacttaggggctggctacaggtgtgcctgaccacgcttgtgagggcgtggtcagagtgacgtaggggactgcgtttgcacttttggtttctctttgcttcttgctgtacaggctgctgccacgacagctggctaggtcgttctgtaagtaaggcttttccctattaaatacccttatatttctacctgactccgtattggtaatttcccactatacactggctgctcctccagaggacagggttcaattcccagcacccacatggcagctcacagctgtctgtaactccaggattcacttccctcacacagacttacatgcaagcaaaacaccagtgcacacaaaataaaactaaataatttttaaaaaatgactcccgtgcctggcgttggtggcacatgcctttaatcccagcactcgggaggcagaggcaggcggattgctgtgagttcgaggccagcctggtctccagagtgagtaccaggataggctccaaagctacccagagaaaccctgtctcgaaaaaccaaaaagactcccttatagtatatttaaaaattgacaaaatgagtcaaaggacttggagagggcacttagctggtaaatgcttacaagtatgagggtgtgagttcaatctcagaacctatgtttaaagggggggggggtgtggtaggcacacttgtaatcccagggctggggagttggagacaaagattccctgagacaagcctacccagagaggtccattcagtgagagaccctgtctccaaaaccaaggaaaagggcacccaagacacaacacctgaggttgtcctctcattaactaatacacacatgtccactgcacctgagcatatatacacaggcacatgcatgcatgtgtaaacacacacacacacacacacacacacacacacacacaagaagagaaaaattgttacattaggcatactgtctgaagacatacagaaaaaacagaataaaatatttaaaacatggatggaaaggggggttaaaaaaaaatcacacctactggcaacactggattcagtgaggttatccttgaaaagaaaaatatgaatcttctctgacaaaacttgatctttcttaccagtaatatgagaggtagttagctctttttgtttgtttttgttttgtttttcaagacagggtttctctgtagttttgtagctcttcctggaactagctttgtagaccaggctggccttgaactcacagagatccgcctgtctctgcctcccgagtgctgggattaaagtggtgccccacggccgcccagctgagaggtagctctttagtgacaaggaaactgatgctagtgagaaactgtgggtgtaactaagcatctatgtggctactgtctcttctaatatgtcatttatacactatatacaaagagggctgcttatgaaacaaatgaacataagttaaccttttcaatctaaatgaatagcaacaattattaggtgattacagcatctggagaagtgaactgaatggcagccatcttatgagggtatgagaaggaactgggatacttgttccactcacaaacattggctgactgcaatgaatgatccaaactctagggtaaccaataaaaataaccactattgttgggtggtggtagcaaacaactttaatctcagcacacaaaaggcaggtacaggcagatctttatgagttcaataccagcctggtctacagaacaagttccaggatagccagggccacacagagaaaccctgtcttgaaatcccaaaacaaacaaacaaacaaacaaaatccccactataacttcacacataccctttttgaagcccaggttggcttcaaactagcagcaatcctcttgcctcagcctctggaatactaggattacagatataagctaaacacccagctaaaaatgattttaaaagaaataaaattggggctaggaaaatggctcacttagtaaattgcctgccactgccagcatgagggcccaagttcaaatccccagcatccactaaaaagccagatgcagcagcacacatctataatcacagcctggaactcagtgtctccagcctagctgaagagacgagcaccagtgagtgagagcctctgtcggaaggaagaaaaaaaaaaaaaaaaaaaaaaaaggggagaggagtgactaaacaggcaatcaggcaaacctgagatcaactttggtctccacaggggaacacatctacaaacatacataaaacacacacacacacacacacacccgcacatactacagaagatagtacactaagagaggtgtcagtgctgtctcataaatgttcaatcaatccacagaagcagaaagctcaggaaggtaaagataacaaatgtaactcagctgcacatgtggcagaatctaccctcctatgccagtctctgctcactgcacaagtctatgcatggccagacacaccgatgactgctacacactaggtttagaaactaactagagacagtatcaaaagcctatgaataatatatatatatatatatatatatatatatatatgccagtggtataaaaagaaacaaaagagcaaactatatgttgtctatgagaaacccactttagtgactatagagagatggctcaggattgagtgcctgtgccactcttacagaggatccaagttcaatcaacatgaggcagttcacaaccaccaatagctggagtctgagggacccaatggctcttgcctcctcaggtacctgctttatatgcacatacccaaacacagacttatacacatgctcataattagctaaaaatatattttttttaaaaagctcataatcacagtaataaaaatttatctttttttaaaaaaatgctttaaacatggtgttatgtctcagttaaaagtatagagactatgtggtggcagacatttataaacccactatttgggaggtggaggcacaaaggtcaggagaagttcaagaccagccttagttatctagtgagtatgcaccactccagagcaatacagagaagcccggtctcaaaaaacaaaaacaaaaacaaaaaaacaggagtgcaccaaataatatcagatcaaaatataggaagcaaaacctcaaagaactaccaagagaaactgatgagtgtttgaacttcacgaatcctcaatcaggcaggaaaatcagtaaggatggggctgacatgagtgccatcacgatcaactagacccgacatctgcagagtatttcatccaacaacagtagaacacacattattctcaaagtcacatggaacagtcaccagacagaccacatccttggccacaaagcactccttggtgagtttcaaaaggtagcaaccatacaaagagtgttctcaaaccaccatgtaatgtgtctagaactaaagagcagactggttggaaagtttaaggtatctggagatgaagcaatctattttaaataacttaagtcaaataagcttcaagagaaaacaaatatattttgaactaaatgaaaagataatttatcaaaatttgtaggaaatggcaaaatcaggatttaagaaagaatttagcacactaaaagcatgtgttagcaaaaaaaaagagaaatggctctagtctatagcataagcttctactttaacaagctcgggagcgcatgaccaaaataatttaattcaagctgtcttagggtttgttttggtttttttttttttttttttttggcttttagacagggttttctgtgtagctttggagcctatcctggcactcgctctggagaccaggccggcctcgaactcacagagatccgcctgcctctgcctcccgagtgctgggattaaaggcatgtgccaccaacactctactctgtcttagggttttatggctgcaacaaaacaccatgaccaaaaagcaagttatgaaggaaagggtttaataggcttacacttcaacattgctgttcatcactgaaggaagtcaggacaggaactcaaatagggcaggaaccttcaggcaggaactgatgcaaaaagctatggagggagctgcttacaggcttgttccccatggcttgttcaacccaccttcttagagaacccaggaccagtagcccagggaaggcaccacccaccatgcactgggccctcccccactgatcacccaatgagaaaatgccttacagctggatctcatggaggcatttcctcaactgaggctcctttctctcatgactctagcttgtgtcaagttgacacacaaaaccagccagcacactgactgtagttgctcagacatgtaacactcatgaggctgaggtaaaggataaacatgaattcaacactagcctgaaggactgactgaataaaacctggtctcaaaaggacctccccctccaccccccccaaaaaaaggaaagattaaataaaaaaattagatctataaagaaaactagaatcaataaactttaaccaggctaattaatgaagaaaaaggatagtgccagaaaaacaagtagggtcattattgatgatcctatggacagtaacaataaaggaatgtgtgagcaactctatggtcacaattttattagattaaatggaccattctctgaatggaactaccaagatatacataaaaagaaaaggatatgctgacaaacccatctactatacaacatttttacaagtaaaagtgggcaaagcctctaaacagacatttttccaaaggtgacagacggccagtaaatgcatgaaaaatgatctgtatcagtagtcatcatcgaaagcaattgaatcacatgagctaatgtcacaccaaccaggaccatatgatcacaaagtccaaaaataagaagtgtttgaggtctggagaaatggagctctcactccaggcagaaatggaaaatggcacagaaaaattcaacacagccaggaagaatggagtgtgactctaattccagtacttggaaagtagagacaggagggtcacaaagatttaaagcctagaggagttacttagcaaggccttgggatggattcccagcaccacaacacacacacacacacacacacacacacacacacacatacacacacacacacacacacactccctcccttccttccaaaattatatgactcagcaattctcttcctaggcaatgtccacaaaagccttgtacaccaagactcacaacaacagtaattttagtaagcaaaagtagaacctcaagtgtccatccactggtgaacagacaaaatatagaacattagtatgatggaaatcttttttggccagaaatcatacacataacacagataaatcttgaggtatactatcctaaatgaaagaaatcagaataaaagaccatatattatttgatcctatttcatataaaaaatattcagaggggctggagagatagctcagaggttaagagcactagctgctcttccagaggtcctgagttcaattcccagcaaccacatggtggctcacaaccatctgtaatgagatctggtgccctcttttggtgtgcagatatacatggaagcagaatgttgtatacataataaataaattcttaaaaaaaatattcagaacaagccaatacatagagacagaaaacaagattagctgctgccacaggccagagagaacaattgtgaagtaactgctataggtacaaggttgatcagggttttggtttgagactgaatctcaactaaccatccttatcatagactcactatgtagctgaggctggccttgaactttgatcttcctgcttttaccttccaagtactgggattaaaggaatgctattgagtttacttgtttgtttatttatttatttatttagtctgtttgtttgttttcctttctgaggaaatgttctaaaattggttatggtaactgtagcttagtacaaacagctactggcttgaatacgtaaatgggtgtgtgtgaaataagtctatcaacacttcaacaaagctgttacgaaaaactaaataaataatggacataagtgaacttttaaagtgacaggaatgccctaaaactattttggtcacagttgcatgattttataaatgcatttttctagatttatttgttatttttatgtgtgtggctgttttcctgcatgtatgtgcaccacacatgtgcctgcagaggtctgcagagcacttcagatccctggaactgagtttaggtagagatggctggaaactgccatgtgggtactgggaactgaacccctgaaccagcctataattcattaaaaaaaaaaaaaattccctcaaatggaacttaaaactagtaaaaaaaattttttgagacagtatataatggagcccagaccagcctcaaattcctgacttcccctactctccacctcccaagtactgggcttacaagcatgggtaaatttggttatttgctttacgtcttgataaaattgtattttaaaagacacattgaggactggggagatggctcagcccgtaaagtttgcctctcaagtgtgaagatctgagtttagaacccagaactcacataaaaagccaggcatggtgaagtacacagtaaccccagcaatggcagaggtaagctcaccagccactaacttggctatgtggtgaaggtcaagccaatgagagtccatgcctcaaacaaaaaagggagacagcatctgaagacagacacgcaaggctgtcctctgacttacacatataccctcctctgcatgtatgtaactgcactgacccccaaaaacacaggcatgtgcatgtatacacagacatacacacaataaatattaaagagtccaaaagggaacacagaactgatatgacatttgtagagcaagtattggattaaataaatacatttaaatctccaaagatcagttatcatagtaaagatactaaatattccatttaaaacaaagtttattatgctgcctcccagagaaacatttaagaaaagcttgacataaaagacttggaaataagccgggcagtggtggcacacacctttaatcccagcacttgggaggcggaggcagaggcagaggcagacggatctctgtttgagccagcctggtctacagagctacacagagaaaccctgtctcaaaaaaaaaaaaaaaaaaaaaaaaaaaaaaaccaacaacaacaaaaacctgggaaataatacatgatgtaaaggcatacaccacaagaaacatggtgcaatttatcggcaagaaactcaaagcaaagagcacttccagacagccaggctgatgacaagtgctgctaatcccagcacttgaaaggctgaagcaagaggactgccatgaattcaaggctagcataggctacatggcaacacttgcctcacaagtaaatgaagaacatgtccagagataagtggtttatgaacacaaatgtgccagtctcagtgggatgcatagctaaatccaaagtaaatccttaccacttcagagacactcagagtcttcaagcctttgagaacaggcagattcttaaacaggaaaaaccacataagtaacagaaagaactatattaaaaccaagcatttatgttcaccaggaaatgtgtctgctgtttttatgatagggtctcattatgtagcactggctggcctggaactatatagaccaggctggccttgaactcaaaggtcttgttgcctctgtctcctccatgcctggctcatcaaaaaatctttacagattaaaaaggagtcacagaacgggagaaaatatctataaaacattgctataaaaggtacatatatccagtggatgtagtggtacatgcctttaatcccagcactcgggaggcagaggcaaactctgagtttaagggtaacctggtttacagatggaattccaggctagccagtgagacactatttaaaaaaaaaggggggggtgtatgtcaaagacttctggttaagttaaaaagatgaaaacagggcctagagagatggctctgtgattaagagcactggtgaccttccagaggacccaggttcaattgtcaccatccacttggtgagtcacaaccatctgtaatgtcagttccaagggatctgaggccctgttctggtgtcctcaggcaccaggcatacacatgacacataaagatatacgtacaagcaaaacacccttacacataaaaaattttctaaaagaaaataacaaaaatttacaaactatttaacaggcaattcacaaaaggggatttctgaaaagtgagttaatgaaaataaacccatcataaactaaacacatagtgattataccattaaacatggtggggggacctaaagttaagaagattgacacaaccctatagggtagcaagaacatgaaactgacagacactgctgagaatggaaactggtatacacacctgagaacctctggtgatggattatcttccaccctagcaattctcagcatatagcctccaggctatacaaatgcaaaccaaagacatgaacatatcagcactattccagcgcccaaactggaaggatctcaaacatttctcaaaattaaaataaccgaattgtgattcactgatacaataacaagccaaaacaaagatggaccgaccatgacttcatcatcttcaaggacgagcctaaaaacaaaatgtggcttaaaagaatgaacttgatcaaagacaatggaacattattacttaaaacttaggagaaaataatgtgcaactcagaattaaacctgatacgtgagtgccagagtaaaagacattttcaaatatgtaaacatgaaaaaaaaatacctcttacatactttcctgggagtctaatatcaaatgtgttccaggaaagacagatacagattaagaatacaaggtctaaaacacaggaaagtcagcaaaaaacaagagttaaatgctctgaatttgatgaagggtgttctaagaatccagctgcaaagacaccaatccaaactccagtgaggaagaggaggatggaaaacttaaaaagccaaagttttagagtttggggtcaagttatgcatataaagagagtaaatgtaaaaaggatgcagttttatggtaggaaaagactcagaaggtttcatgtagtatatgacatgtctttatgagatgtatcatttaaatataatatgtacccccacaggctcatttttgagcatttggtccctggctagttgtactcttggaagattgtagcgcctttgggactgtaacctaggtagcacaagtggatactggggacagctcttaaaggtaacgcccaggttgttctagccagagcacactgcagcctgtctgcaccatggactcctactcggatgccatcccctccatggtggactacacttctgaagcctgagccaaaataaaactatcctctcttcagctgcttccatcaggtgtcagtcacagtgatgagagatgggaccagcatatgcagtgtgactccaaaaggaaaaatctaggaagggagatgaaggatcatggaaaagtctctctctacaaggagacttcctagattcaaactgcagtggtcctcacatgactacacacgcccatcaaaccccctagaaccacacactgaaaatgtctcaaaggtatagcacacgctcagcacatgtgaggcctgggctctagcacaaaaaaagagagagcgaattttactatgtatgcatttatatagcaataaaacaacatgaaaaggactattttgaatgccaaggaaaaatacattaagccagtaactttatgtatacatggctctgctataaacagtaattacatcagcagcagaatgtaatttataccaacaaccaaaactgtgatactgagagaatggtatagacacatgacatacagagtctaatcgtttacatgaggaagaaaatagatattatcaaattgaaaagtcaagaaacagctttataaacaagttagaaatactggctctctagcttcttggggccttctctagtgaaagcaatagctacactacggacaatggttgccttgggagaatggaagtcagagggaagagtggggcagggcattgctgttgtctgtaataagcctcatgacacccagagatccagtcacagtccaaacacttcagaaggaattttactacttatacattggcttacaaaacacttatttagaataacatgtaaagccaggcatggtagtttgtacctataattaatcttagcactttggacagagacaggaggcatgccatgaattaagagaccatctgggacaatatagtaagatccaggccagcctgggctacagagagagatcctgtctcaaaatataataaataaaaataatcgtttccactttgttttccttgcaagtagctgagccctgtgaaaaagccaccatccagtcatctttacagctgagttactggcaggtgtcatacagggttttcttttcaagcacttgtggtttgacagtttgcaggcatgataatcttttacatcatgttccctaagttgtcagcctgtttagtcaatgtgacatttccaggcattcacaattttcattcattgtctttactgccttccttttaaaataattaaaagctaatttctatgaaaacaaatgtatatcttctttgtttaatcctaagcataacatagctaacatctcaaaatacctaagtacaggcaaacagacattacaaaggataattaaatatcttgctagggtagtctgataacaagcattaaccactgaatacttgtatcctttgcaatggtgtttgtgtggtttcaacacaattaggagtgcatctgagggtttgtgggtacaaatgctactgaaattaatagtatttatacatttctgagacttacttatccaagaggttctttctccctctctcaccctcccctccctctctctcccctaaccagtgaggaaggggtctagcttttgagtcaggatctctctatgtaactctggatggcctagaactggcctggccttttagtgtgtaacagccctgcctgtttcccaagtgctggagttaccagcttgcaacaccaccacacctggtttcccaggctttctcagtatcacattgcccttaccagaaaagagaagtttttcttaaattcctaagtttcaaccctaattagtttcaaccctaaagcaaacagtacatgggggttgggggtgggcatgaaaaggggagggaggtgtgggagggtgtttgctagcttgtaccaggccccaagtctgattcctagtaactcacagaaatgaaagtagggagcatcttaaaaaacaaaaaaaaaaaaaagtgaaagtaagaacaggtgaaatctagagtgatcacaaagacaaaagaacagcatttgggaaacagaagggatcccataacccggactaccaaacttccaggctacagaatacttgaggatggtgggtgaccatctgcacaggtacactgttctagtgcccagtttatccagtctatctttcccctcaactctattggccctgaagacctgcgccctcattatacaggaaacagatttatttctactgcaatgggaagcagctggggagcttcaagcagaggattttaagacccatttttttttttttttgaggatcaaatgtgcagatgaatatgaaggcatcaataaactgcaaagtatcttggcatatttattaccttgacagaggacagacaaaaggttgggaagaaaataaggcaaatgaaaactcaaatagaatcagcccattctaactcttgtgacctacagtcctctcccaggctgctcctgtgtcccacttagcgagggggagactgagggaggaaaaggtttgatggaagaggaaccaagattctgatcttctacatgttaaatttttatctacatggacattcagagcaggtggctggaaatacctacccatgtggagctaaagaaaaaaaaaagtcagaggtagaaatatagacttaagagccatcagaatatagagtatttgttaaaaataataaaaactaacctatctgcacactcatacttcagttactatttttaatgcaaaaacttattttcctcaccataattttaagaggttagttaggtcctgggatgatttctattttacatataaagaaacatacattgtcaggcagtggtggcacatgcctttaatgtcagcactcaggaggcagaggcagaggcagatggatctctatgagttcgagtccagcctggtctacagagttccaggacagtcaaggctacttagtgagagcctgtctcgaaaaataaaaacaaaaagaaacagatattaagtatctttctcaaagacataaagcaaatatgtaccctatccaggtttcaaatcacaggtgtcctgactctgtaattctttaaagccatggggtcactggagagtgactataggcaaatacagactagggatacaatatttcagtttaaatagtttcctaagtccttcctttcaagtgcttggcatggtttcaggcactgcagatacaaagcaaaataagacactctctcaaaaaagtccagtctcattactgctagctgagagcaactattatcaaataaccagtatctggcacactggctaaactttctggacctatttcacctgattctcctaacaaccttataggatagatgtcctcactatcacttcagaaatactgaaactgagatttgaggagattatcttagcctagggacacaggctaaaaaaggtcggaactaggatttgattcagatccatcttacctcaaatccagacttttccagagaaattctaccatatggtattactcagataaaccttcagcaagagaaagtagaaagtggttacagaagctgaggaggggcatgaggagttgcttagtggatgcagtttcaggttcgcaagctggaaagttctagagattaggtgtgcataggtgtgaaaatagtaaaaagtactgaactgtatagcttcaaacagttgtaatgatcagatgctgtattgtatttttttttttatttaaaaggtattttttggcaggtggtgctattgttactgcccaacctgctgccccttgtagtctacttaatgaaatctgttttctttcccattccaccaccccctcaaaacgttttttaaaaacctggcacttttttactgtgccatatgcggtaaccaatatgtgtactgcactaaggaaatatggttgagcaaatgatttattctgcatagcaggagagaagatagggagagcatagcaaggaggaaaactaaaaactctactaagagaggaaactatgaactgtaaaggtttccattatcactactatttggaggacaggaattcctaattcaacctctgaaacaactccctcacctgtataaaactatcaaagaaatatgcaattacaggctaagaaagcaatgtaaccaaacaaactttggggattaacagagtaatcgtgaggaccacaatgcccagtcaaaacaggctttaagaataatccaacagtcttccaacatagtttcctagttcatagtttcaacactggaaacaaattatttccctaagttgcctcatccagcatgttaaagatttctatggctcactgtttttaggacacagattatctgaaggggtatttagaatctcattgcctaacctttttgaacttcaatttcctcatctgtattaagagatgaattcagcacatggctcaaaatactgaaaactgctggatgtggtggaacatacctgtattcccagcactacctcaagttcagggttagtctaatctatataataaactcgaagccagccagatctatgtaggaagagcctgtctcaaaagtaaacttacttaaaaaaaaacaaaacaaaacatgaacaccttgcacactgattgatccaaagtatgtgattattaaaggtcagtcccctctttgcttgtctctacatagtgagctcagtgacatatcctgacttcaaggacagaacaagtattcctcagatcttcttagggcagatgcagaaaaatgcaataaaggaaagatgctcatccacagtttctgtaagaaaatatggctacccaaaagtgctccttcatctgcaaccctttacaaatacagactatctcaccctcacccttttagtcctttgagtaatattcaaatggctcaaaattaattttaaatatgtaatggtactttgaaaaaaatctcacacctattccattccctcatccacacacctaattcccactcctctccaattcaacactcaactggtttcttgtgtgttcctgaaaatcatatgcaaaactatcttttacttaagctaatgttctatctccctcccaccccctcctcggtttgtttttcaaaacagggtttccctgtgtaacagccttggctgtcctagaactcaatttgtagcccaggcttccctggaactcacagacagagacccgcctgcctcctctgcttcccaactgctggggattaaaggcaggcacccagctaaacttccgtttcaaagcaaatttctgggaccacctgagaggatgaggaaaatgtgagaggagtcatccatcctgcattattcaaagtagtgtcctgtgcgcgcacctacgcgcgcgcacgcacgcatgcacgcacgcgcacacagacacacacacacacacacacacacacacacacacacacaaacacacacacacacacacacgccacgcatgtactggacttgcgtatcaatcggtgtgatgataagctaggcattaaatataaccttaactgagcgctctccggcccttatctgcacctgaaatgcactaacactttacactactatctcctttgaatttagcaataacctgaaactaagtcactgaaagataacttgcacaagcaagacagaaagtagggctttgaactcgggcttgactaaagttcttcctccaaagcatgtcgccctacactggcaaaacagtctctgcacccgttggagctcagcctaatgtgggagacaggcgtgaaaagggcacacaacaaagaaatatgcaattacaggctaggaaaataatgcaaccgaaaacgaactggaggatttgacagaataacaataggggcctactttcgaagagggggagcaacgttaaggcctctttgagaagatgacatctacgataggcttgcgaaccgtttggggggctgcagggaggaggacccggtcctgctcacaaggggcaaacgccaggccagtagaagatgaagccaactcgccaagggcccccagacatgcagacgtggcgcagggaaatgaggatctagaaactcggcccagggctcatacgcgccatccgcaccccggcagcgcgaccccnnnnnnnnnnnnnnnnnnnnnnnnnnnnnnnnnnnnnnnnnnnnnnnnnnnnnnnnnnnnnnnnnnnnnnnnnnnnnnnnnnnnnnnnnnnnnnnnnnnnnnnnnnnnnnnnnnnnnnnnnnnnnnnnnnnnnnnnnnnnnnnnnnnnnnnnnnnnnnnnnnnnnnnnnnnnnnnnnnnnnnnnnnnnnnnnnnnnnnnnnnnnnnnnnnnnnnnnnnnnnnnnnnnnnnnnnnnnnnnnnnnnnnnnnnnnnnnnnnnnnnnnnnnnnnnnnnnnnnnnnnnnnnnnnnnnnnnnnnnnnnnnnnnnnnnnnnnnnnnnnnnnnnnnnnnnnnnnnnnnnnnnnnnnnnnnnnnnnnnnnnnnnnnnnnnnnnnnnnnnnnnnnnnnnnnnnnnnnnnnnnnnnnnnnnnnnnnnnnnnnnnnnnnnnnnnnnnnnnnnnnnnnnnnnnnnnnnnnnnnnnnnnnnnnnnnnnnnnnnnnnnnnnnnnnnnnnnnnnnnnnnnnnnnnnnnnnnnnnnnnnnnnnnnnnnnnnnnnnnnnnnnnnnnnnnnnnnnnnnnnnnnnnnnnnnnnnnnnnnnnnnnnnnnnnnnnnnnnnnnnnnnnnnnnnnnnnnnnnnnnnnnnnnnnnnnnnnnnnnnnnnnnnnnnnnnnnnnnnnnnnnnnnnnnnnnnnnnnnnnnnnnnnnnnnnnnnnnnnnnnnnnnnnnnnnnnnnnnnnnnnnnnnnnnnnnnnnnnnnnnnnnnnnnnnnnnnnnnnnnnnnnnnnnnnnnnnnnnnnnnnnnnnnnnnnnnnnnnnnnnnnnnnnnnnnnnnnnnnnnnnnnnnnnnnnnnnnnnnnnnnnnnnnnnnnnnnnnnnnnnnnnnnnnnnnnnnnnnnnnnnnnnnnnnnnnnnnnnnnnnnnnnnnnnnnnnnnnnnnnnnnnnnnnnnnnnnnnnnnnnnnnnnnnnnnnnnnnnnnnnnnnnnnnnnnnnnnnnnnnnnnnnnnnnnnnnnnnnnnnnnnnnnnnnnnnnnnnnnnnnnnnnnnnnnnnnnnnnnnnnnnnnnnnnnnnnnnnnnnnnnnnnnnnnnnnnnnnnnnnnnnnnnnnnnnnnnnnnnnnnnnnnnnnnnnnnnnnnnnnnnnnnnnnnnnnnnnnnnnnnnnnnnnnnnnnnnnnnnnnnnnnnnnnnnnnnnnnnnnnnnnnnnnnnnnnnnnnnnnnnnnnnnnnnnnnnnnnnnnnnnnnnnnnnnnnnnnnnnnnnnnnnnnnnnnnnnnnnnnnnnnnnnnnnnnnnnnnnnnnnnnnnnnnnnnnnnnnnnnnnnnnnnnnnnnnnnnnnnnnnnnnnnnnnnnnnnnnnnnnnnnnnnnnnnnnnnnnnnnnnnnnnnnnnnnnnnnnnnnnnnnnnnnnnnnnnnnnnnnnnnnnnnnnnnnnnnnnnnnnnnnnnnnnnnnnnnnnnnnnnnnnnnnnnnnnnnnnnnnnnnnnnnnnnnnnnnnnnnnnnnnnnnnnnnnnnnnnnnnnnnnnnnnnnnnnnnnnnnnnnnnnnnnnnnnnnnnnnnnnnnnnnnnnnnnnnnnnnnnnnnnnnnnnnnnnnnnnnnnnnnnnnnnnnnnnnnnnnnnnnnnnnnnnnnnnnnnnnnnnnnnnnnnnnnnnnnnnnnnnnnnnnnnnnnnnnnnnnnnnnnnnnnnnnnnnnnnnnnnnnnnnnnnnnnnnnnnnnnnnnnnnnnnnnnnnnnnnnnnnnnnnnnnnnnnnnnnnnnnnnnnnnnnnnnnnnnnnnnnnnnnnnnnnnnnnnnnnnnnnnnnnnnnnnnnnnnnnnnnnnnnnnnnnnnnnnnnnnnnnnnnnnnnnnnnnnnnnnnnnnnnnnnnnnnnnnnnnnnnnnnnnnnnnnnnnnnnnnnnnnnnnnnnnnnnnnnnnnnnnnnnnnnnnnnnnnnnnnnnnnnnnnnnnnnnnnnnnnnnnnnnnnnnnnnnnnnnnnnnnnnnnnnnnnnnnnnnnnnnnnnnnnnnnnnnnnnnnnnnnnnnnnnnnnnnnnnnnnnnnnnnnnnnnnnnnnnnnnnnnnnnnnnnnnnnnnnnnnnnnnnnnnnnnnnnnnnnnnnnnnnnnnnnnnnnnnnnnnnnnnnnnnnnnnnnnnnnnnnnnnnnnnnnnnnnnnnnnnnnnnnnnnnnnnnnnnnnnnnnnnnnnnnnnnnnnnnnnnnnnnnnnnnnnnnnnnnnnnnnnnnnnnnnnnnnnnnnnnnnnnnnnnnnnnnnnnnnnnnnnnnnnnnnnnnnnnnnnnnnnnnnnnnnnnnnnnnnnnnnnnnnnnnnnnnnnnnnnnnnnnnnnnnnnnnnnnnnnnnnnnnnnnnnnncgccatgtctcctcgtccgacaaacaggaagcaagcggccccagagccgcgtagatttctacggggcggcggaggactctccacatcgcccccagtggacagacgcggagatgcaggccgcgtggcgggggggtggggggaaatgtgcgcgcccggaggtcttatgggaagtgtagtctttctcccgaggtcgggcagatgacagagatgctggcctcctggacccacctgtttccccacatcccacctccagcatttctgtgaggttgctccagatggaagactgatcgctgcgtgggcatgctctcgaatttcttgtctgtttagggatgatgcagccgagtggctagtgaaaggccctaggccagaattgtggcttgattctgagttctgtccccttctttttacgactgcctccagccaagtctacccttgctcctcagttagttcattcaatatgggctcagatgagtcaactaacatttgtattataattaacaaatatatcttatgtaaataatatataaaagattcgaagaaaatggtagaaaacatttcatgaattacaaaattgtgttgagattttacagatgtcaataaataatttctaagggagccagctgtactcctcacactgaacaatagaggacgtggagggtgcggtgatgagcagaacagtggagcaccctgtgaggggattgagactacagggaccacagcaagtccacacacaaagaaatgtaactggcgaggttgtggtcaagttcagtgaaataatgcaaggagtggggttggtaagtcgtagcctctgccaaacagaacactgcgctgatttccctgcgctagtgtgctctctctctcttctgaaccgctgtagcgcggcggcagcggtaaccactctttccctgttttctctccagggagagctgaatgtgctgaattgggatgtcatgaagtttgctgcttgtaacaaaggaggctttaatttgttacacaaaccaaaatcccgtaaagtgtgaaatgatgtaataaataattagactaaaacaacagacatttatgggcactgccaggacaaactagactgtggttactatctttttgtttaaattttttgttcttttcgagacagggtttctctgtgtagctttggagcctaacctggcactcactctggggaccaggctggcctcaaactcacagacatccgcctgcctctgcctcccgagtgctgggattaaaggtgtgcgccaccagcgacctgcgtggttaccatcttaaaatgcccactttagaaagtatgatttctgctcacctccagcagatcactactagattgtctggtttaaaacaaataaaatagggctcgagggatgaatcagcaggtagaggcagtgggctgtcaagactgaggacctaagttgggttccctggaccaatattggtggaaggaaagaaatgactcctccaaattgtcctctaatctctctctctctctctctctctctctctctctctctctctctgtctgtctctgtctctctcatacacacacacaaattaaatgtaatttttaaatttaaaatatatatatattgaggggctggagagatgctcagaggttaagagcaccgactgctcttccagaggtcctgagttcaattcccagcaaccacatggtggctcacaaccatctgtaatgagatctggtgccctcttctggggtgcagatatacatggaagcagaatgttgtatacataataaataaatttatatatatatatatatatatatatatatacacatatatatatattgaaagagatcaaggaggttgcatatggaagggtttggagggaggaatgggaagaaaagtgatgtaattacataataattgtgattgctggagaaaaaacagaaacaggaagtttatcctgtagtgaaggagattttcttcaaaccaatggaaaaaaaaaaaaaaacaggccttcaactttacactaaaatctaaaattcatcttaggaaaatcaaatctaaacataacaaaatcagagtgtatttctaaaactgggttgcggtgacagtagtgcagctacatacatttatatacatacaaatcactggactgtattcaaaacgggtaggttttgaaatataaattatacttccacaaagctgttaaaagcatatcatggtatatatacatattcatacacatacacaagctaattaaataaatacatgtaattttaaaataaaatggacaaaaagttttggatgactaataacagataatgcaacatcttacttctctggcagttttacctgtctggaagaaagtataaggtcacctttgagtaccccgagatatcactcagttgttgccttaaaacttacctatctcagcctggtggtggtggtgtcacacgacttaaacagcagcactcaggagtcaaaggcactggttttctgtgaattgaggtcagcctggtctgcagagcaagtttccggacagccagagctacacagaggtaaaccctgtcttaaaaaagccaaacacccaaacaaaaaaagttaaaagcataaaatgtcagcaatgaatggaagataatcctcttatgatttgggggaagaaaagtcttctcaagtataaaatccggaagcatgactagaagacctcaacatcaggataacctcttgtacaagacagcatgaacacccatagaaggcacgtggcattctgggaaagagttaacttagtattatgaagaacttctgtcgtgcttgccttgacctccgctccaggtagctgtctgagctgctggctttctcatccccttccttctgatcaaagactgctttgctgaacacagatccaaagcgccgtctcttctgctctcacgcctgctttctccacttgacataaaattcatcattctgtccacctctccagttagagctattcgtgatgcttagtactttgccatgctcaactccagtacccagaacagtgcctggaacagtcagtgatcatttttttttttatataatcaatagctcactgaacagataaagctactcctacaaaattgcaacaagccaaatagcacagtagaaagagagggtatcgggaagctggtgagatgacctgtggtaaaggcatttgctgccagctcagaagacccgaactcaaaagttgagagcagagaacccattcctgaaagttaacctctgacctccacacaagtgccagaacatccttgttatgcatgtgcacatgtgcgcgcgcacacacacacacacacacacacacacacacacacggtgtgtgtaaataaataaataaatgtttttaaaaaggaaatagatgagctgggtggtggtggcacatgccttcaatcccagcactcgggaggcagagacaggctgatctctggtctatagagtgagttccaggaccgccaaggctacacaaagaaaccctgtctccaaaaaataaaaaagaaagaaagaattagatgggcaggaataggcaagtcttagaacaacgatggcaaatacatgtagagaaaacaaacaaacaaacaaaaatgtaagtctcctagtttccccaagtggaatgctgatggtgagaaggtctgttgtgctttttcaggaagcaattttttatcagtatcaagtgagttagaagcatacttcttttgactcaataactctccttcagcattacactaaatagcattctagctagtataattctagaaaacatagccaaaacaattagtcaagaaaaaaaaaaaaaaagaagtggccaagttggaaaggaagaagcaaaatcatctctatttcctaccatccatctgtaggaaactaaagatttccacacacaaacagaaccaaagaacaacctcagtgaagtttgcacaatacaaaaaccacaaataaaactgagcaaatggggttggagaatgacagcttggctattaaaatttcctactgttctctaagaggatctgagttcccttcccagcacctacactgggagctcacaccagctctagggggacttgatgccctcggctagactacacaggtatctacactcacatgaacataccccaagaacacacaaatacgtttaaaataataaagataagtcttttttaaaaccttcacctcaaatttggttcttaaggactccatatgactaggaattaaggagaaaggttcccaggtatctgtgtgatgctaagtgcacttcatctctttcctgccactttctcccatggagacaagctgctcctcaccaccagcatccttctaccaaggggacctggatttgggtcaacatggaaaagaaaattaaacaaaatggaaactcttagcttgactaattttttttgcagtaatcccatgaagtataactacatatgacgctgtaaattcccagaattaactaccaagatcatctcaattaggcatacagatttttctagagcaatttttttttaatcatggggaagtcataatcaaagagaatcacattattatactcaggccatagtaagaaatgtccatgtaatcacgcagcatcttgaggtgtaatttttaacactattttcatattttgtttctaatgtacttaatgtttgagggtttttaaattattttttacagtgtgtgtgtgtgtgtgtgtgtgtgtgtgtgtgtgtgtgtgtgtgtgtgtgtatttatacatttatttgatgagggagaaggtgcatgtgctacggcacacataatgtccttttctttccttttacctgtgggttctgggttcatgtccatgtttggtgacaagagcctttacccacagatccatccactggcccaatggtttgttgttttaaatagttactttatgggccgggcacctgattggtctaataaagaactgaatggccaatagcaaagcaggagaaaggataaatggggctgacaggcagagagaataaacagaaggagaaaaagagagaagaaagagcaaggagccagaaaagaaggagtcagccacccagctacacagccagacatggaataaaaaggaaagaaaagatatacagaaatagagaaaggtaaaaacctagaggcaaaaggaagacaggataatttaagaaaagctggcaagaaacaagccaagctaaggctgggcatttataagtaataataataagactctgtgtgatttatttgagagctggatggtgggcccccaaaagagcaaaggagtataaaacaaccaactacactccatgtcattatttgggaggtggcagtatgaagaaagacccattacaaatggtgtccagcgtaagtgcacatatttccacatagggcatgagaaagagacctcttgagtagcctcagtgtacagagtctttttaaagaggccctgctacaaagtacttaaatggggtttatgagcatcaggcatcactctactcggtggcaggggactaggggactaggactggggcagatagactggctccaggccagacctctaggcatgaggctccactctcaccaacatgaagagggcagagccagatgccaagccatgtgcttacagaggagggcctagttgctgcttagcaatttaatgtttggctcacagcaaagaatgctgtacatgtgaggctgaagacacctagtaaaatctagaccaagaaaacctctaaatagagtaagttttaaaatgtgctaagctgctaaagaaaagaaaatagggatagatagtcatatggttttttaaaaagattatttatttactaagtatagtgttctgcctgcatgtatgcctgcaggccagaagagggcaccagatctccttacaaatagttgtgagctaccatgtggttgctgggaattgaactcacaacctctggaaaagcagccagtgttcttaacctctgaggcatctttcctgccccagaaaaaaaaatagtttataaataataaatcaagtctttaaagaaagagaaaaataagctgggcggtggtggcacacacctttaatcccagtactcaggaggcagaggcaggcaggtaaatctctctgagttggaggccagcctggtctacaaagttacacagagaaaccctgtcttgaaaaacaaaagaaaggaagaaaggaagaaaggaagaaagaaagaaagaaagaaagaaagaaagaaagaaagaaagaaagaaaggagaaatgaaaaagaaagagaaaaataatattttttaaaaacatgtaaagatgggaaatacacagggcatctgtatcctgtatggtgctttgttgactttgaattttttgaatgctaatgtacagagaattacagctgctgagaaacagtggattatgggagagactgctgaattaaactaccctatatactttagggatatcttggcttcagaatggaagttggacaatgtgttgtgttgattcctttatagttcaagatcagatttgaccagaggagaccccatgaaaatcctggctacagacataaagaaataaacctagaaaaactacaagacagagcaagaggaccagtcaccaatgaaaatgggtggcccaggtgatccagcctcccagagtgcctctgttgcaatttcctcagagttctgtatccagagaagcttcaagtctgttggccgagatggtgcagcctcacagaccattctagttaggactacacataagccttgcactttcccattgcaccaagaatggacaacaaatgttatggctagtttccccagaactgggccattatctcaattttctcagggtcccctaaagatgccatcatccccagacaacaggaagcagtctagagaacatgacacccacattctcaagaggtgggtagcttttggttgtttggtggatatggatgttgtcatcatttaggggggttggttacaaattgctggtcatagtcagggagaaagctaaacaaaggaaattagattcaagaatctctttcaaaaaggaagaagggggaatatagtatagaaatgatggaataagagggtggattgttgagtctccttttgaataaccactattttacattggtatggaattttgtatattgatacaaatatatttgtatattgtatatacaaatttgagattatttttatactatatatatgtttctattcttgtttaaggcattgtacctatgcaactcatttaaaaatgtaaagttttagtccttaaaagctatttaagaaaataaagaaatgcaggttagtagtcatccataacaatcaatcttatagtcatgttaggtgtgttttcaaggtcatacaaagatatattttagataggtgatcttcaaacacttcaaagacttacagaatatggcatttaaaatgttttaataacataaggcttttcataacagtgagacacagctgctcctggcagcaccaatttgcttcataaaaggatgatgggccttgaagaacttccatatggagtttgctttctttgtgtcaaaagctagccatttgagcaagaaattgctgacagtatgctttccaaattggacaagcaggacacaaaaaagacaactgccaaactttgccaaggcaaggtaggacagttcttcaaaattcctgcttcatagaaaagtctgtcagatatcttaggcctgtaggctgaagatggatgccccaatattacaaaggaatcttgggatgactgtccaggtagtcagatgcctctgttgtttcttagttttgaaagttgtttgctctgcatttcaagtaatattctatccttcttggctctctgatggagttgaagatgagatagttacagttttctttgttacaaaattgagaaaaaaatttacaaaagagatgtaaaatgtataaggttaagtgatataaaagcttaagttgttgatctaagaaaatgttttaaggtctaaaaagatagttttaagatggtaatataagttatgatagaaaatggtttaggtataaaccattcatcaagataaggtagataataaagtattttctctgaatatgccaaatacaaatggactgaacattatgaatgcaattcgttacccaataattgttctcattgtttatagttttattatgtaagaattaaaacctttcctttttatttagataaaaggggggaaatgttgcagaatagtcctttacactgtgtgaagatgtgtcactgtgattggtttaataaagagctgaatgatcaatagctaggcaggaagaggttaggtgggacttctggaaacagaaaggtctgggggaagaagaaaggaggagtcactagtaggatgcaggggaagcaagatattcaggagacataaaagccaagagctggggctggagagatggctcagaggttaagagcaccggctgctcttccagaggtcctgagttcaattcccagcaaccacatggtggctcacaaccatccgttatgagatctggtgccctcttctgatggaagcagaatgttgtatacataataaataaataaataaataaataaataaataaataaataaataaaatcttaaaaaaaaaaaagccaagagccatgtaacagcacatagattattagaaatgggctaatttaagttataagagctagttagaggggcctggagagatggctcagaggttaagagcacaaactgttcttccagaggtcctgagttcaattcccagcaaccacatggtggctcccaaccaccttgaatgagatctggtgcataatgagatactaaatgcataaaaccatttaaaaaaaaaaagagtataaaaaaaaaagagctagttagaaacaaacctaagctaaggccaaactttcataattaaaaagaggtctccatgttattgtttgggagctggtggtacagagaaagacttgttacatcatccccctactctctagagaaaactcttcttcccaggaagtccctctctttgtgagtgacctggtgaatttaattagagtcgcttacaagaatgtgcctgggaggttatttgccagcacttgggcaataaaacataaaaggccctttgtgtctggcttctagctagcatgaattttcgagattcatctatattgtagcatttggcagaactccatttcattttggggttgaattggcaattcccatcacattgttctgaggcctctgccatctctgccacaacctgctgtcttcattacttatttcttcacatttctagttcagcccaaagcagacaagaaaatctataatatgggaaagctacaagacaactccatcttttcaacaaattgtaatcatgtaattttttttctatcaaaggtagttatcccaataagggtatgttgtagaatattaaagatgtgttacatttgtttatggggtggaacatttgtttaatggtgcaaatatgtgttgcatttgtttaactctgtgaagctgtgttactttgcctgtctaaaacacctgattggtctaataaagaactgaatggccaataacaagacaagagaaaggataggtgtgggctggcaggcagagagaataaatagggggagaaatctggtaagagaagagatctaggagcaagaggaggaggaggactccagggccagccacccaactacacagcaagctacagagtaagaagtaaagaaaggtatataggataaagataaaagcccagaggcaaaaggtagacgggacaatttgagaaaatctgggtagaaataagccacgctaaggacggacatttatataagtaagaataagtctccgtgtgtatatttattcgggagctggatggcagacccccaaaagggaaaaaaaaaaaacaaaacaaaaaacaaccaacaacaaggataccaaatgcctggacctctcctttcccctttgctctgattagcctactatgtcagattgtgaagttgagttctcaccaatgggatgagacacagtcactacctatgttagagataaaagacagagaccatctggccagcatgttccctgccccagttttggttcaggtgtaccctttttgcaaaaagaaattggcaagttacttttgttttgtttatgtagtcctttgtgggacactgagattattcttttcttacacaacaaaaataaaaagtaagaggatgaggttaaagagatggctcaggggttgagaacactgactgttgttgcaggggacctaggttcgattcccagagctcacatggtggctcacaacctctgtaactgattctaggggatctgatgctcttttcggacatctgtaagtaccaggcacatatatggtgcacacacatatatgcatgcaaaacatccatacacataaaataaagatgagtggaaagagggaaaggagaagggagtgtaacaaaggcagagaaggaaagaggattatatatcagatgacattgcagaagcatgttgtctaattaccaaatacaggaattctgcttagatcctgactcattaaaataaaaatttacaccacagtaagaattttgaacatgaattagaaatttaaaggtcttaaggaatagttgctcattttggtaatgagctctgtattattttattagacagagctcactatgtaggtccggctagcctcaaactcatgatatccctgccacagcctcctgaatactggaactatatgcctgtctgccatgctcaccttccaagatactttcactttgggttctacataatatttcatggaaataagtaaggttgcttgtaagcctaccatctttttaactcttatttatccatccattcattccttcatttgtgtggtgtctgtagaagccgaggaggtttctcaccaaatctggaacaagaaggcagtcagcaagcccagggaacctctggtctccactctctgttgctggtgtgtgtgtgtgtgtgtgtgtgtgtgtgtgtgtgtggccacaaccaggttttatgagtgctgggatcagaacccaggccctcacacttctgcagcaaagcattcctacccactgagccatctctccagccccaagtctactatctttgaaggtaaatttgttgaagttgaatgaaaagcacgagggaccgccattttgttctggtttttttttttttttttctgatataaaaattctcctctaccaagagaccctcccagaccaccctacccaaaggttgcttagttttctccccattactaatgtaacaaccacttctcttccatcctccccccccccttcctatttggcatgtgtttagatgtgtgtattagctccagaggttgacatcaagtgtcctccttaattgctctccactttttgagacagtatcttgcactgaacccaaatctcacaattcagcaagactgactactgagcttagggatccccctgcctcttccctcacacactccacctgctccccccaactccagcactgtgatgacagacactgctgggcctgtagtgtggtgctggggatctgaactcatacttgtgcaaatgaaccatctccagcactcactctgactctgttcttcactaaacttacgccactgtcacttcatacactcattagtgtatttctctctaccggaatccagttccaacaggaataaaatctgttttgtttgtttgctgttactctctgggactatggctggcacccaaaggtgtttaatagacctctactgcccggaagaacgcatgcataggggggacagctaaaaggtgaaggcacatgttagaaaatcaacaaagaaatactggcaacatcaccttcctcaaagatgccagaaaaggaagcgactttcaacttttagccctgggggctgtggagctactttggtgttttgccatatatccaattggctgcaaaaaataaactagattcatgattgttagcacaaaccctttttttgagtgaaatctcatcaagagtccatccagtatgtaaaacctgatagccaaaagcaaatttattattttatagcttactctcaaaaaaaagtaaaaattaaaaaaattatccagtggttatgaggaatctaggaaaacctggcccagcaatgccagtttggaagtgaagggctggctagggcagctgagaagtggggttctctgcttggcaggctgcttctcccttggctggtcctgttttccaggtgcggagggtgagcctggccctgctggcggctcccagggccctgagctcgtcgtctttctctgagctcttgacctgctctgcttgagcgagtggagctccctcatcaagtcctctacttcccactgctcctccttcagcctccggcaacagtgcaaggcagcagggtcaatgggatgagcctctgtgttgaagatgtagccgccagctcccaggatgcattccccatggggggtcatcacagagtcaaaggtggagccgttgttgtggatgaagttgtttgggtgaaacagaagatagaggtatttcacagtctcagccaggaagaatgactccatgcgattgtccagcttgtggtcccggaggtccttgatctgccacaggagaggaagaagagagtcagaacgcaccatggtttgggagtaagggtcaggcagcccagtttataaactgctctactaaatagctgagggcctttgggtgaatcacttctcagagcttcactctttccaagccaccatcacctctcacctgtgtaatgacaaaaactgggcttctgcgtctgcccttccctatagtacacttagattgcgggtcttacctgacccttctcataactctctgggacatctcatttcacacagactgaaaacctgagtctggcggttccttcaggacctagaccctgcttcctctctccctcatttcttcctacttggatccttttcttgcagctccatccacaaagcacactcatctgagtctttgtgagtatttttaaacacagatctaagaagtgagggagccagctatgaggctgatagggggaacaaaaaggaagtgactcttcctctgctcctctgcccctctgcttctaataaggtctttttgaactcttgaactctgctgtggtctctttagccctttgtagctattccatcacctattcacatttatacagacccacagatggtcgatatagatagatctaactcctgcatgatgtacagtgtgtaacccaagaattaatattattattaaagattggaataaaagaacatgtgtttgccaatggatagctatcaagggaaattgggactacttggaaagctgcaaccaacgacactgtgaaaagatatcaatgtgtccatctgtttccaacacagtgctcatgacaaacaatgacacatattcctgacctgacccttccttatgagcatcaggtttttaccattgtaaataactaactaggggttggctatagaaaatttcaaaagttcacaagcagagatgtgaaagacccccggaggctcaggcccccaggatctctgcccaggaccacggcaaccccaatcaccaggtggaggtgaaagcttgatgcaaacagcaagaggctttattgcagttgattaacgagctaaccccatgttagctcaggcctttcatccatccaccatggcggatggctaggaaagacactgcgaagccacggcatagagatattatagggcagcgtaaggggagtgtttaggggtactcacaggcccaggattggtgtgcctccaagcttggagggtttgccctgtgttgattggttaactggttgttatggcccataggccctcccagggtgattgctatgctctgtgcatcattgctgtgcacttgtccataaagcacacccagagccataaagcatagcaccaccagctaacttctgattggttccttgccacgaggcaggcatctgacctcttagtgaccaaggcaaggtcaggcaagcactgcaaggctgttatggctgccgaaatgggaagctggtcccttcagatgaataggataatttactacaaatgcttactttcagcttcttagattcaccagtgcatttaaacaaaattaattctcagtggacatttagcttatgcaatactgtgattcaagtatggactcagtcaaagaccaagttggattttcttcccagtttgacaaagattgaagggctgttcccatcatgcatcttgggagacctcctggaggcccccttttcatggaaatgcggttagctttcccagtggactcatcactgtgggttttcagagaactgagcacactgggagccaaaacaaaccactgcttcactactgcattcactacggtcttctctatcaaaaaatgagtctagcaggaagcagagctcagctgtagagctcgtgcccagaatacatccagccctaggttcaaatttaggaccatgaaaagaaaaatgacctatctatacttaaaaaaataccaacacattaaaaatttttgcaaaagttttgctgttttgttttgaattccacaccccaagacaaactctatagtctgtcaggaaacagccagcttatttacttagacatctgttttatgtgtatacaggggctgtctgtacctcccctgctgggtcctataagggtgtcaacctctctcaagggggagctagtgtgttatttctaaagtacaaatcaggtcatggcactgctctctgttatggatcctaccccaaattccactccctcctgtgcctacaaaggccctgcctgcgtcatctacctctgccctttctgggacctcctctccatccttcctcctgctcactctcctctgtctttctttctgtttcccagacacagttgcattatttttccaactaaaatgtaaactcatgagagcaagggtctgggtctgcctgtctctaacccatggcctagaacaatgcctggcacatgacagtcctacagtaaatacccgtgggaacagcagaactgtttattaaggagcccatgtttgaattattcgactttagattatttatttattattatttagaccaggttattcgactttagatttcgtctcttaaaaatcatttaaaaagccctgggacaaaactttctacaaacactactttgtaaatcacatattctgacagataaggactgctggtgcagaggtaagccaagagcttagggtctaatccaccacggtaactaggcctgtgccatttgtaaaactccactatggttaattatgacaattccagtaactacaataatttggtttctggaagtggattaacttgttgctttgtaagtttgaccgccctgccctgggggccccacgtagtagccaccaggaaagatgtttatcacctaacatttccaactgtctactcactgcttacccctagcaatgacaaaccacaaaccaaaatgaaccttttcaatcatcttccatgctctctcccttgtgtcctattaactacaccagcttgtgagaagacaatgggctctgattcttacagatccctctctggacatctttccccagaaaggcctgtgctgtctgactcactcttcccttacctgtcttcctgccttgctaacctttcacacttccactagacagtgaccttcagcaagcttctctgttcatggtttacaaccactcccttcaggagctaatgctccagcaccaccaaatcaccaccatggcttctgagcagcaagaagctcttaaacgcttaccgtggcaaatccacattccaccttgctgattttctcaatggactccacagcatctctcccgagttctaagagagtgggatcccctgtggcacggtagaggtacattgcgctctcgatgagctctgaaaagccaagcaaaccttctcagtggctgagcagttatggcatggcgcccacacagcgaaggcaacaaagcatgcctcgcctccatacctggtctattgtgccccactggagagaaacatggcatagcttttgggactacttggcaaactgcaaccaatgaaaccactgtagcttatgaatttattatcaaataagttctgatataattatggaaagactgaaggtgtccatggtgggttttcagagccaagatgcacacatcctgaagctccgttgagcccagcagactcccattccctggagagacagaggcggcctggctctgggacagagaaggtagaggaggttgtgacctgttccgcaatgtctgctccctgcctgccgtcagcagctcatgtggctggctgactagcaactactcccagctgagatgtgataagaacagaacatggtgccatgaagaagcacttgttcaacacatggaaagctctggctatgatatccagaaaaagaaaaaaaggttgactaagaaaagtcagcttggcatagtggcacacacttaaaatcccagtccttgagaaatgaaggcaagaacatcagaagttctaagtcaccctcaccagtacagtgagttcagggctagcctgggctacatgagactatggtaaggggctctagatatttttaagagtcctattctacaccacagctagattatgatgtttgaccaggggccttttcctaagctggatattggctaatgggaaggggcccaggtgagactatttaccattaaaaagaaaatacattttttcaaatacatgaagaatttttatgggaaaaaaaatgattttctgctgttgacagccttggtgggcagaagtgagaactcattgtgttttcttttttctttttgggggggcagggcgggtttcgagagctttggaacctgtcctagaactcgttctatagaccaggctgacctccaactcacagagatcccattgtctctgccttccgatgctgggattaaaggcgtgcgccaccacacctggcttcattatgttttctacttcggcactaactggttctcaaatcaatgaatttctctcttccttccccaacatctctccatcttctttcttctttcctggttcccttctgatggaagggatcccacttattcacccatctactcatttctgcagtgctgggagcagagacagggctgtgcacatgcgaggcacacccccaccactgagcagtgtccagcctcatctactctattttgaagaactagtctctgcctatctcctcagatctctctcccctccctcctctgcccccacaggcctctaaacaagtgctaatccaactgttcacatcctagggtgcattccagggcagacaccacacacagaaaagacagtgctctcgtgggaggccttcctctgctgccagcagctggctgggtcaaggccaactttctctctttctcacacatgagcctagtgtgtgagtcagtgcttgcctgtatgctgtgtggtcatgtccatgtgcccttccaccctcaactcaaggagctaaaggcccttacagtagaggacttcaggctaggttctgtaactgtcatcaaagtcttataccagggtaccaagcactagccagcatagctacagaagagcatcttctctccccctattgttgggggtgaggaagagtgactcaactatgaaactcctaggactcctggcagtgatgtgtatttccctctggaaccttcctgccagccagtcctgcaaatagagcaggtgcctccataagcagcgagatgtctctggtggtgactagggcaggacttgaaaactactgggtccaataactgtaggaggagttcagtatgaagggcctctctgaagccccagtgctgaaactgcatctaaatatttgacaatgtagtcacaaactctgagttttattttatctcctggtaacaaaaaacatcactgatacttcccaggagttttcttaaaataaataaaaaaaaaaaagccatgagaagctgggcattggtggtgcatgcctttaatcccagaactcggaaggcagagacaggtggatctctgtgagttccagactgacaagagctagttccaggactgcctccaaagccacagagaaaccctgcctcgaaaaacaaaaaaaaaaacaaaaaaaaaaaaacaaaacaaaacaaaaaaaaagccatgagaacaaatgtcagagaaatatcaagagcagccctagaagtccctgtatgtcattcctgatccctctactagtgtcattttactcttctctccctcccagggtgctacactcactggggttagaagcagcagggaatgggcagagaacacagaacagggaaaggcactaggaaggccagtcttgtggctcaaagggaattcaggtagcaaggtgggggtgggcagggtgaggggatgaaacttgattgcccaaggtcccaggttccaccactccatactgtggaagtgttctttacacaaagcactcacagaagtggcctacagtttatgacgtcctggtggcagaagcacccaagactcagcctcgctggcatctctcttttgctcatttctccaagtttcaaagagcataggatttagacaggaaacctgggttctggtccccgctcctgccttggctaagccacttcaaccagccagagctcagttcccatacctagcaggaaaaccaccgagagtggttagaggagagaaaagctgcctggggagcacctgtgaagggtgagggtgtgaagaagcagtgcctgcaggttggccacggaccaaacacactgcttacctggtcgaagtggatagccttctcgcttctccactgtgtatccctgagcaatgttgtagaactctggcagccccccaaactgcttccatacagtgtagtagttgagaaaggtcctcatggcattgtcaatatccccaataaggctctgtggaaaagcagtggtcaccaaggtcagcagactcaggcaccgagtccatgggtaaaacatcaccatcaacctcaagggaaagacaaagcaagccttggaagctaaaagtgctattgaccagtcctaaagttgatcactgactctatgcagccctgagccacaaagtgaatgtcttgtaagacataaaactcaacacctattcataccttgctgaggacccgagattaagtctctggaccttcttgaccagtgtctgctactttggtgagctgatccaaatttctaagcatagggtaaggctgactgtgctaagactcatgaggctcccacacctccaacagacagccttgtccactaatttcctttagaatgtttccaagtttctttatgcagacctaagaaaatgagtgtgttgttttcttacacagcccttcagtcatctctcctggtttcctcccacacacaccgagtacccaccttcctgttcatgcagctgcacaggggtcagtcacccaggccaaagtttaccctgttctataactagacatttggtttggttccagtcttttgctatttgctaaaacaattaatgctgcaatgaatactgcctatacatcacttcaagcacatgaaaatgtatctatctgtaagacaaatctccagaaacaggatttgtgggtcagaggatatctgttactagtaagtctatttaaagaatcctttactttctttcctcttctcttctcgtctccttttcttttcttttcaagacagggacttaccacatgactctgtctgtactggaacttgctatatagtgtaggttgatctcaaactcatagagatccatttacttctgcctctcaagtgttggaattaaaggtatgtgccaccatggccaggtcacttacctatattttaaaattctacttaagaacttaaaaaaattaattattactcctactggtttattatagtgcaacagcaatcttgatttctttgtgtttccttgactctttatatgtgcatgtgtgcatgtgtgtgtgttcctgtgcctgtgtgtgtatatgtatgtggaaaccaatagacagcctcaagtgttgatccttagaagatgtccccttgttttttgtggcaggtccctcactggcctggagctcttaccaagtaggttaagtttagtaagttccaggccagacaggactatatagtgaggctctctcaaataacaaaacaaaacaacaaccacaacagaaacacagtaccaaaactcaacttcctcaacagtgttgtgggatattttatcatactgtgtaaagatatgtcactgtgattggtttaataaaaagctgaatggccaatggctaagcaggagaggttaggcaggacttctgggcagagagaggaactcggggatgaatctaggcatgtaggagatgccagcaagacacggaggaagtcagacgtacattatggaggacagataactagctacatggcaggatgtagattaacaaaaatggattaatttaagttataagagttatccagacaagtctaagctaaggctaagcattcataattaataagaagtttccatgctattatttaggagctggcagaccaaaataaagtccaactatataacactgtttcctgaacacaggctttatgtttataacacaaaggtagactgtctgttctcatagcctcttaagtgtctttctctcaacacttgggaggcagaggcaggggaaatcagaagttcaaggtcatcccccattacatagtgaactcaaggccagcctggaagatatgaggtcctgttataaaacaaaggcaaactgaaggcatggcatcatttagattacaaactattttggtacatgaaatattgtggtacaggcagggaaggttagatgggctccaaggccccttttaattataactctatcagagtggatcagggaaaaaaatcaggacagtgggcagagcagtcactgtgtcaaggagggaacatgaaagaaatgcccagtggaaaaacagctcttgccagtggctgttcctacctggggcctggagcaacactgcacattgctacagatggcactacacccacagccactgggagctcagctccttaatgctcccttgggaaccatggtaaggtagattcatgcatctgtctaactcactttagttctttcttccacacactgccccagagcactcaaacaactaaagttccttatttgatacattagaataagcttgcttacatcaccataccacagaaaaatgatcacttgctttgacaagtcctacctgaagaccaggccagtaggcctccaaggactggaagactggcatggatacggtgcccttgtacatctgcacccagaggtaccagtcatcgaagtgggtgtaattccgaatggctctgttgtactctgcatcatgggagatcagaaaatggacacaggtgattgaagagacagacaaaccttgacaacagaagtgtgccattatactcttaaatgttgcatgatggcctagctttgaagcagactaggatacattgaggtaagcacactagaaagaaacatgggttcaaaactccatgctcaaattcttttccacgtgctagctatgacctgggcaaactctgccctctttagcttcaggtttattatatattaaattagggaagtaatgtaatataccttgtgggattattcagtcatttattcattcatcaagtaagtacctaactaggtattcagttaccaacaagacaaagcctcccccacatggagctgagttgaggtgacatttctcccctaggatgtgcgtccaaggacttcagttttgcgttcactgcagagtccccaacaccagcacagtgcagaataaatatgtgtaacaaatattatctggatgaacaaagaaccaaatgcagacacaaattcataagctatggcaaaaaaaagtaataagaatgagacaacacatgctcagagctgggcccagtggtttgtatgtcaatgttacccaataacacatgctgaataaatcaaaagtggctgtaataactattactgtgagctcgacaagcttgcatggaaattattactagtgttcagtggtctgaaaggtcaatttttaccaaccagataaatgtgacctactgcatatgaaggactaggagaaaccggataatgagtaaggcagagagcacatgcagaaagactcagcgtgctctgaggaggagcacgctgcttcctaggcaggacatgaaaccaggctttaaaggaggacagaaggtgaacacatgaagacaggaaataaaggagaagcaaagagcatgtgaagtggtcaagaggtaaggaatccagaccacagttagagaaagcagtgtctcaggtggctcctacaggatgttgtatacaggcagctcctaggggttgttgtgtagcagtttactccaagattaaaaccttccacattggagagaagcccattaagacacagaatgttagaaaacaggtgaggcaacagggacgttctaaggggaggtgaaacaatggagaaactcagaaggctcaggaagtgagcaacccaggcttcaggaagtccctgaactcaaccagatgcactgggcccctccgtcagcaagaatatataagctgcaagggctgcttggagattttctctgacaagctgagttgcctggaagaggctgagagtggtgccaagccacctgggagaagcagagcactgcctaatagaagcgaggtcagtcaagccgcctggagaggcccagaccacacaagctgcctgcaagagactcttcgacctgttgagctgcttgcaagttatgtggtatgctccaggtttcccatactgttgcccatactggttcattcagtgatagagctgtctctgagtcatttttgttcctgtgagcacctctcactgactcatcatttctgtaagtaaccccagtaaaaccctctggttcacagaactggatcttggtggtgtccatactttagtcactggatccctatctggggtgaaaaggtgtttattcatgtctcctcaggaacagtgtcacacaacaaaagtaaaggtgggaagataaagggtttaaggttctccttggctacagagaatttcagacaagccttaggctacacatgagaccctgtttcaaaaccaaaataaataacaaaaacaaacaaacaaaaaaccctaaaacaaacaaaaccataaaacagaaaaagaaagtttgaagaggtacagtggacatcagcagcctccagtgactctgaatgaggaatggacgaattctataggcacttggcagtaacgtgacatacacaataaagcacaatcaacagcagagccatagaaaaacccccttaccctgccccttttacctagaaacatcgccatgagcttcttatcctgaagaagaatggctccttttaccaggtactcaaagtaggagtccacaccggccccaatgcctgcgtcctgggccacccatttgccagtgagcacgtctatgtgattgccaacctaaaagagaaacacaaggccaaagaatgctctacctagcgctctgactgcccagtgagatgccaggcgggcacctcagtgtctctttaagacatgcaagtgtccagtagatagaaaagctggaggggaagtgacacttcatcctttggacactagcagattttttcatcataacttccaaccagggaaacaaagcccccggatttgtttttgctgcttgagtctggtgattagtttgatcattccttgtacctaaacagtgccattttgaaactggaatgcttattctatgccactatatattgtatatatgtaactttttattttatagcagcttacagttaagagacttcagaggtgttggaatcttcaaagactatggggaattttaaagttagactatattttagattgtgagcaaagtatggaactttaggggaagtcctaagagtgatgtctgtgtgtcaagttgacaaggattgaattgtgatactggatactgtacaaccacatgggaagggactttcattgaaggatcgtctaggctgcactagcctgtgaggatgtctgtggggtgttctctagatcactgttaattgagacagaagacctgcctcctgtaggtaggacttctgtctaagaagaggaccctggtctgtatgagagaacagtaagcaagctgagcacagtaaacatgcacccattaattcattgctctctacccttgtctggggatacaatatttaagtatttaaaaatatttcaaagccacttccaagttcctactgcactaacttccacacattaaaccctagcctaggattttgtgtcctcttgcacatttttgtcacagtattttgttccagaaacagaaagagatgctaagacaatcatggggcactatcctcttatatattgtgaggcatggccatgaggctggaccacagctatcccttctgcacatctctactgtggagagacagctcgtgtacctttgaaaggactgacttagcatactagacaaaaaggaagagagaatgatctgaagtattcacgccgtgcttagcgtgagtgtagaggagagatgagaacttgattctggaatctgtctcagactcaagacaccagtttgtgactccagtgtctaaaaatccaacacagcggaacatgaagcatagcagaagggtatctgcttagcatttgcaaggccctgggttcaatccctagtgtcaaaaagtcaaaagcacatcagctcacacacacacacacacacacacacaacacacacacacacacaacacacgcacacacgctcagttcccagccacagtccacatctcactatagctaacagattttttaaaaaatattttatttatttattatgtatacaccattctgcttccatgtatatctgcaccccagaagagggcaccagatctcataacagatagttttaaagttggattattattattattattattatcattattattattattattattggtttctcaagacagggcttctctgtgtagctctgaagcctatcctggcacttgctctgtaacccaggctggcctcgatctcacagaaagcctctaccacctaagtgttgggattaaagtcatgcaccatcaaagcctggtgatttttattattttttaaattgagtattactattttcattctatatatgtctgtctgtgtgcatgtgtgtcacacgtgaatgttgacaggccagggtgcacaggaatggtacaggagagaggggtacagacagggtactaaccaagtccaccacagttccaaggctggagctaaatctgcctgcattggactaaagatgctaccatgggcctctaggatggcatctgaagggatttttctgaatcctcagacaagcttcactctctaagctgacttcacaccaaactttacataaaatcactttcaaaaacacaaggagctgtagtgtctcagcatagtgtgccttgtttgtggtttttgtgagtttctatgtgtaacagtcctggctgtcctggaacttgctctgtataccaagatggcctcaaactcatagagatctgttgtgggaatttgaccattcagtctaatgaccaatggcatggagagagtcgcccccctaggtctctgagagtgaccccctaagaagcgtgagaggagggttgagtgggtctcttggcgtggaaggcttcctgacgctacagctcagtgacctggtccagacctttccccatcctttcctagtggacaaagaggcagcggtggcacttcatcctgtattggtgagtgtgttatttccatttcatcccttaataaataagtcttcatcctagacttccagcagcatagcttttaacacacttacatcactgctgggatatctgagaactggaggctgaacgatcttgaagcagggccaggacttgcatctaggctgaactgaacccagagttactgtcctgactactctggatcaatgactattagtgtcactggcttatcccttgtgggatgtgaaattagatttggggattagctggtccagaatgttaaatatccatttgttaataggaactgaagggaaaatgatgatctggggtcaaatatgcttgggaaatattaagcaaagctagagactcctttaccattgcatttaataacttttattctgtccaagttctttgtgactctaaaggaaagcaaaaacaaaaaacctggtaccatatgcaagaattccctaatttaactgttcaagaattttttttttttcatagaactcaacatctctcagtgctggtgttctagaaaacacagttttgcaatgccaatagtcattggaggccaggtgaactggtaatccctggccagtgagtcaggggtgtgaagtatatgactcctgcctagaagaaagaaaggctcaaagtacaacatagccctgttccaaggatgagcaatctggctctcttccctcttgtgctagccagttttatgtcaacttgacacagctagagtcattttggaagagaggacctcagtgagaaaatgttcccactgtgggcatcttgacggaagattgatgcagaagggcccagctcactgtgggcaacataaccccagggctggtggtcctgggtgctctaagaaagccagctgagcaagccatggggagtaagtcagtcagcagcactcctccatggcccctccatcagttcctgcctccaggttcctgccttgaattcctgccctgacttccagggatgatgggctacaagatgtaataaacgctttcttccccagctgcttctggtcatggtgttttatcactgcaacagaaatcctaagacatctctgtggcaaaatgtaaatggctcagtctatttttggtatcctggaccactcctacaaacacagttaagattcctttggctgacatctaactcattccttagacctctgggtctcataaggggggtggggggcaacacagaagccttagctgacacaagaaaggcaactgctgacttaccagcccaatatctgaccggctctcccagaggcgcatcagggccaatctggccacatcttcaaacacagggtcaccagtgaggctgctcagggtggcaaattccacaatgaaggtcccaatgcctgctgtacaggtaacaggggtctctcctgggttcacaccatgaagcaggttcacagttccatagggcatgcccgtgggggtctgaaatgctaaaccatcagaaacttatgattttaggtcaaaggagagtgagatgggtgggttgatgatagacccaaagcttcaggcttcaatcagccttcttacttttttcctaagtaattgcttgtgtcagagtcagagaaagatgtgtctcgctgtaggatccttaacccagatgcagacaaacactgtgctatgcaacctttggctcccactgtgatgaggtgacctgcagagagctgagctcccagctgccacactccacaccgcacacaactttttatttattttactactttatcttcacactatgccttccatagccagttagataatggagtgtgaagtaggcaaggcttatgttttatgcagtactgaggccccactggtaattactcgtagactctcaccaaacaaaacagatcagtagaggggtcaattttagatccctgatttaaataaaaagttcagggacaaaatattattgttgttgttgttgttgttgttgttgttgttgttgttgttgttgttgttgttgttgttgttgttgttgttgttgttgttgttgttgttgttgttgttgttgttgttgttgttgttgttgttgttgttgttgttgttgttgttgttgttgttgttgttgttgttgttattattattattattattattattattattattattattattattttgagttttcaagatagggtttctctgtgtaacagtcctggctgtcctggaacttgatcggttgagcaggctggcctctaactcactgggatccacctgcctctacctcccaagtactgggactaaaggtgtgcgccaccaccgcctgactgacaaagttatttttaaaataaaatctaaaaataggatacaaaccaaaccactgatactatacaaccccctactttcaggtaggggaaaatcatgcctgtaacaagtgactcagctaaaggtcacataggagagtcacactgagggagttggaaatgactgtcctgaccccaccctttcaaatccagcccagtgctttgcctatcttaccccatgccttctgagtccagggaagaactcaacaatgagcctaacatagaaatttcctttccagccacaaggcaagagacagcagagcagtctgcacgtcaccaaattgcaaactaatctgtcaaaacttctaagcgttacaaggtccagacactttgtctgcaggaggaatgaaacctgctctctgacacacagcaagccaggaggagtcataagcaagaagggctccggagtattttagggccaggcaggaagttaaaggaagggtgtgagaatcctctttcttgacctacagaggagatacatcgctgcaggcttaataattactcaatatgaactttagaatgcgtgtattactcagtaaaaataatttttaaatgagaacaaaacagaaggcgcaataaggcagttttctccagggatgaatcacacaggacatgatgtttgtgaggagacacgtggccgtgagccatgggctataagacctgagcccagctcaccctctttgcccggccctccccagggttgacagacaaataagtgagatggccaaggagccagtagaaggcacacaacagcagtcatgtgtttgggtgtgaagagccctagacttctaccacacccaatagggaacacagtgtccagctgattctgctgagcccaacgttgatgaccccactggatacaaacacggaggcttggctcatagttctgaacatggcttaaccaccaaaaccaattcctgccatctgaagcttgctaagcatctgctgtctaaactcagcttagccttccaaaagatacatctagcaggtacgaattacagttgacagagaaactgacccacgggaaggagagtgacatggcctagatgctgggtggcagaggaaagcctagaacctggagccctaatgctcagaccatagctagtccctggggccctcttattctggtagcatgtggcctggggggggggcaagcgggctcactcaaaataaatgcaagggccatggaacctgtgagactcgcttttggcctataccagcaaacagtagtagcatcagcgtagccatcctgggccaacacccccagcaagcccttaaaatgcttagaactcctctgactttaatagtgagaactctcctgatttctatagtggatggcttctataggggcagaaatacagattggaggtttttaaaaaatcaaaaatcaggggaaaatctcaacattgctatccttatctccagcaagcaaagtaggattagagcagaagtgtggtacacacctgttaactcagcacttggaagcagaggcaggactataaaaagctcagggttgagccttgactacccagtaagttacgggccagcaagagctacatactgataccctatctcgaaggaagagaagaaagggggaggggctaaaagaaaactgtcatcttccagtgcccccacccattccatcccacgctcctacccctcacctctgccccatctctgcctggctcttacctgggaggagttttcgggctgcttcctcagccatcctgaggaggggtccagaacagggccatccagcttctacttccacaccagccttctttgacagcagatgagcagagaggagccctcctaccactacagatggcacaaaacacaagggtctcatacaagagatcctaccttgaaaaacaaacaattctattggtttccatagtgccaaaaggtgatatacaagccagagaaaatagatttacccagcagaggaccctgaatgctacgactcttacctgtccgccaagataagtccacaggggtaatagcagcatgactgctgtggagcaaccagccactttgtgactggatctgaggtgtgctccaaaggaaggaatttatgtctggtattgtacacttgatcaaaagcccacggttgggaaggtcaaaggctcctagtggggaacctcatactgttgggttgatgaatgaatggacatgtcaaactgccttctaaatagttatttgtgtacccatacattagtgctgcaaaaaggagcttctctgaaagttatcagtatgataatgttccacttattctcaatgcagagaatcataactggccaaagtcctgagagtaagtgactactgcgtgagtgcccagccatcaacagaatgtctatattgaactccctcaaggccaggaaatgtcagaaaagggactggaatgaatgtaagaggcaaaggatggagagcagtgctgtgaatatggcatggtcactgcactcgtgaactcacagcagctatggttatctgtacaagatcaggctggtaagcatcccagcctgaaggggacaggtgctcgtgagcctccatccctagcggatgaaccactggtaactggtggctgcgaggggtttggccactggtaggttgcccatgctccagtgggtgaccacactcatgtgcaggcagcatttactagatatgaaggctggaagaggaagtactgggggtggttctggatccagtgagaagagggattccagttgcatatgaccaaggtacattgtatacatctatgaaattatcaaagaattcattttaaaagtgagttacgtacggtatgtgctgccaagtatgacaatgtgggttccatccccaggacccagtagtggaaagagaaaattaattcccccaagttgttctctgatcacacacatgctacgtcattgtgcattcacacacatccatacaataaataaataaataaatgtactacaactttaaaaaataaaatactctaaaacagtgattcttaaccttcctaatgctgcaacccttatatagtccttcatgatgtggtgaccccaaccataaaattactttcgctgttactttataactgaaattttgttactgttatgagttgtattgtgaatatctgatatgcagggttagggtgacacccccagaggggttgcaacccagagatcgagaaccactgttctagggctggagagatggctcaaaggttaagagtgggggctcctcttccaaaggtcctgagatcaattcccagcaatcacgtggtggctcacaaccacctgtaatgagatctggtgacctcatctggcctgcgggaacacatgcaggcaaaatactgtatacataataaataaatctcttttttaaaaagaaagagatgagaaccactgttctaaaacaaacaaagatcattccttaatcccaccaattttttccctttgtgggtgataaaaacaatggccactctttgaagtccccagtacagaccaaaattcaggtactacatcccccctctgcagatacaaattttaaggttctgagaagcaagtggcttgccctgggtcacctatgtgacaggtggtagacatctgtctcacttcagtgtgtcactcttctgtcacctgttgcccgtcagggggtgagaagacagctgtcattacccctatgcgacaggtggtggacatctgtctcactgcagtgtgtcactcttctgtcacctgttgcccgtcagggggtgagaagacagctatcattacccctatgtgacaggtggtaggacatctgcctcacttcagtgtgtcgctcttctgccacctgttgcccgtcagggggtgagaagacagctgccattacatcacatgatattcaggatgtacaacaagacagagatcctgtgactggaaataaggctgaccagataccaggaagtgaggaagtgtcctctgacaaaaaataacctgagaccctgagctttagttttccctttctcctggctaagaagaactgaggaaaaggcaggactgggccaaacaagtcctctgataagaggtctctgcatgaagcgggccctcaaagaattatacattctatgtaagaatgaattaagaatggaccttgcatacatccatgagtggacattaggaaaattacaggcctcaaacactggaaccaagtcaaagtaagggggttatgtgagagccaaagttatgttttaagttttaattaagagatccgtgcctaagagagccatgaaacaaaaatgtcactgatctgcaagccccttgcccaaggacagctttacttcctgaaatgctggaggttgttattaatgggagataataagccacttccttttgcacccctaaacaagttcatttgactccactgcaccagatgcacgtgatcacacataggtaggaggtacaaaggcaggaaatatgtcagagtatatgcttgcccctgactggatataggtgccatgagctggtggaatcaaacctgggtcctcaaagaattcattttaaaagtgagttacgtacggtatgtgctgccaagtatgacaatgtgggttccatccccaggacccagtagtggaaagagaaaattaattcccccaagttgttctctgatcacacacatgctacgtcattgtgcattcacacacatccatacaataaataaataaataaatgtactacaactttaaaaaataaaatactctaaaacagtgattcttaaccttcctaatgctgcaacccttcctggatataggtgggaggtaaacaggcaggaagtacatcaggatatatgcttgcacctgattgaacttcatggaagtatggtggtggccttatgggtttgtctttataaaccttagcaaaatgtgactcaagttgccattttctgggactcctggaccagtcctgaccagagttcatcaccctggccagtatttaattaaagctcacttcaaatttcactcaaaaattgtacaattggtctttctcaattctcaggtttaagagttaggaaaaaaaatccccaaagaggtagtgattatccacaaattttacagtctgaattcacatgaactcaatggtctagaaaacctcaaaagttagcataagagttggcactgtaggagcctggaaagtttggggttttgtagtagcagagatcaaacccccagcataaagaggggctttgtaggtagtacctcaagtcacatggcagaaatcaacaaaatgtatctggaaaaaaaaaaaaaaaaaaaaaaaaaaaaaaaaaaaaaaaaattttgaaaaaaaaaaaaaaaaaaaaaaaaaaaaaaaaaaagctcattccatccaggcctctaagaagccaattggtgaagtctaggaaatgagcctatagtaaataatacaaataagacttttaaatcacaaaagcatgtggaaacaaagctcatgaataacaacagagaagggtgcaccaccacttcagatgctggtgttttcactcagagaatggaaaatcctcatgagaaatatacttagagaaatgaaaaaaagtgggtatagaaagacgaagcaaaaaaaaaaaaatagtaaaaaagattgaccagtcatatttacaaaaataccatacagaacttctaaagataaaaacacaataattataagtgaaaatcacatgatttactagtacataaaccatacctgatgaaagacctagcagactagcagacagccaaggttaaagttatccaaagtgcaatatgaagatacaaaatggttcttagatacaagagcaatttaggggacaaggtgagaatctagttgaaaccaaaataggtaaaatagacccaagaatcccaagcaagataaaaagaaacccacattgatatacattaataaacacattgttaatgtatatattgcaaaacgtcaaaaagagataagatccttttttctcactttgttaccctaaataaaacattttaaaagcagctatagtctgggtgacaatgggtgatggctgctggactagcttctcagggtcatgggtaaaattacttaaaattgtccagaataaaaataattttaaaaaggacagatacagtaaaaataaaaaacaaaagcatagttatttatctacaaagaaatgaccatgagattgatggattatttcttaacaaagtaaaagcaggaaatagtggaaaatttctttgatagactaagcaagagaaaataatcattaacagtggccatacatgcagaaaaaactctcccaaagaccgaaaggaagcgagacaaagacattttcgtgtaaacaaagcctgagaaagtttgccaagagcatatccacacacagggaaattctaaggttctttagagaaaagatggattgcacataataaggcctgagtcactgaagctaagactgtcagaaaggtggtaacagggctggggagatgccaaagtttgtaaagagtttgccctgtaagtatgaggatctgaatcctatcctaatactcatgtaaaaaagtgaatgtgatggtacacacttgtaatcacacacttgtaatcccagtgccgaggaagccgacaggagattgctggggctaataggcccgccagcctagcatagtcagcaagccccaggtcctaatgagagaccgaacatggaataataatacctgataaataataccaggatctgacctctggctatacacgtgcatgcacacttgcacaaacacacacacacacacacacacacacagtgggtggggtggggtgttaaatatgtgcaaactaaaactataaagtactaaaatatggaacatgtctatgtctatcatttaggaagagaatagagatttttcactacttctaaactttgataagttatttgttctatttgctgagacactagaagataccatgcacaatttcaacattaataagaggaaaatgaaaactgggtgtggtggctcatatctgtgttgtcagctagagaatggctttgactttaaggccagtttgtactatgtagtgaattgtaatacggctttggcaacggggtgagaccatgtctcaaaacaaaacaaaacaaaacacaaaacaaaacaacaacaacaaaacacccgaactatcatggtgtagtggtgcatgtctttaaacccagcactagggaggcagaggcaggcggatacttaagtttaaagtcagcctggtctatgcagccagtttctggacagccagagttacattgtgaagctaaatctcaaaaagtaaaaaataatgaaagaaaataaaccaaaccaaaaaaccatttccatccacaaagataacacaacctccacggaagcagttacacctttcttgttccaacaccaaataaatgctatttactctgggaagggggcagcgctgtctgtcactagtctggaccagtgtcctggaaaggtgactcctgaagacctcatttaccattctagttgtcagagacaactccaatgtcctttcatgcaagccctagaaggtggccctcacctcggatgttggtttcgaacacagaggcgttcacgtcgatatcaaagtccacgttgtcctggagaacctccaccactctttggaattcagaggtattccccaaaatctggaatgaaagagtaccctgaccacacagctcccctaagcatggaagcagttcagatgctggtgtggtcttcacttttcagtcagaacctctctgtcctgagttcagttacattatgccagcattcatacagaaacccctagctgagcaatttcctggtccatttaaatggatcccataaaaataaagcagggatcagtagtagacaccagctgtttgtagctcacttgtcctttccaccttatgcaaaacagtatcagttgcttcccaatcttctttaccccaaagcctcctgccacagagcccaagcacccttgggttcctttacttcaagaggtcaccgtgttaccatactgtgatccttgtaacatatacctctgggaacaaatcttttcctagtaacagacacggccagcacggtttttacctggccctacttttctgacttgaaagcagacatgatttctgtagggtgacagctatgtttcaccctggggtacaaagcgtgagaataaaaccctaatgacgagaggaggaagctacaaagagcccaagtctctggtgacatagctgagtagctggctcattactaggaaaaaaaaaaattacctcttggcttcctttttcctttctttctctttttgaaaactttattttattttgtgggtttgagtgttttgtctccacacaagtgtgccacattcacacttcgtgcctttggaggtcagaagcggggagttgggggctggagagagggctcagaggttaagagcaccaactgctcttccagaggtcctgagttcaattcccagcaaccacatggtggctcacaaccatccgttatgagatctggtgccctcttctgatgtgcagatatacatggaagcagaatgttgtgtacataaaaaaaaaaaaaaatctttaaaaaaaaaaaaaaaaaaaaaaagaagaagtggggagttggatctcctagcactggagttgtgaggcaccatgtggatgctgggacccaaacccagggctcttaaccactgagccatctctccagcccccaaacgttaggcttaaaggaagggtcgcattttcattcagctttgtggttcttctccatttgaggttggtggggattgaacccatggcctcatgcatgaggcaagtattctatcaactaagccatatcctctcctttcttttacccaggaaaagaaatctctgtttaaaccaccagccaaatgctatagataagtgtgtctacatacacatatatggtgtatatagatacatacacggaaggagagagcgtgtagggaagagagaggggggtggagagagaggcggcagggtgggggggaagagaacaagcttgtttgaaatgttctcatacagtccatgctagcctctcatacagcccaggctagcctcaaactcactacataaggcaacaatggccttgaacttctgatgttcctggggttgtgacaccatgactagcttgatatataatagtgatttttttttctgctaatatcacctcaaattccccttgaatactcttcctcccatagtgatcccaataattcaggagagggggatcccatgtccccagctgtggagtgggtacttcagtgggaccagccaaggtaccacatcccttccccagtgagactgtttggaaatacatatgtgatccaaatctgatcaatgaagacttactccttggatgaatggaaagggtgattctttgaacgtaactgtttcttaaactaggaagtaattggaaagacaataggctgacctatggcttatgaagactgagaacacagcagccaagataaaagacagagataaaaggtgaaaggagactcctactagcgtcattgtctgtctggatcaggtcgaaggccagccttcatctagactttttagttatctgactcactaagtttgtcttcttgcctaagtcagttgaattgagcctctgcaacccaaacaatttctgactatttcaacactagagctcctctaggactgggaaccaacctaccttctggcctctctctctcactgttcaccttcatctgcagtaaaactgtgcccatttttctccaattttctactgttttctccataagaagtcaagtactcatagtcttccatttataaacccaactcatcactggcgactgtcacctgctctacaatgcctcttttctttctttttcccttaagaaccctatgaactccatccatactactgttagggtctctctttctttctacattaaaacaaaacaaagagacctttgaaatggcagaggcctcattcatttttgtatttccccaaagtgcagacacaggaaaaaattacttgacaaatgtttgttggatgaggccacaaatctttcttcacattgcgtcagtgaaatgtcaaagcagaaatgtcatcacttccttatacttaagaaatgccagtggctcttctatactttcaaatgaaagatcatacacactgaagaagagcttacagtctccagatcccacataacccccagtgtcacttgttccctcctctctccccatttccaatcaatgcttcaatctctgctgccacaaagcctttgcactagctggcctggaacaacttcttccagcactttcccagctaccaccagcttcttcaaattccaactccagtttcatatcactgcttcagagaacttctcccagcctcctcagtctaggtcagatcttttttttttggggggggggtttattttgagacagcgtttcttctgtatagctctgactgtcctggaactcactccataaactaggctagccttgaactcagagatcagcatgcctctgcctcttccttccaagtgctgggactaacgggtgcaccactatgcctggccagatcattttttgttagggtctttccaatacaaagctctggcctgagtgtgtaattatcatcttttatggctatcatttgattctcagtgtgtttccggtgctaacatctcaagcagaggtcatttctgtttaaactcatcattttgactccaaagtttagcaccatgcttggtgcatagtttccctcaataactgtttgatgaatagttaagaacatacaaattaccagtaaacaaaaattataagacaaaccatatctatgtagtgttcagagtcacataaatattatagatgtataaagatgagaagtggccaggcatggtggtaaatctcagcacgtgggaggctgagacaagaggactgccaagtttgaggtctgcctggctaaacaacaaacctgtgtgtggtgcacagaacagaagacaatcaaggattggagtcacacaaaattaagtttaagtctgagttccacttttagctttctaagcatcacatttcccagctataggaaataataagaccataagaattactggaaggattaaatgtgataatgcatgcattgtaatttgagtaagaattaattgtgacaaactgtgtagaagcctaggttcccagcaggtagcactattttgagaggttatcgaaaccttattaagtggacctagctaaaggaagtaaatgggaaagggtccgggagggggggggtgctttgtccctgaccctcctgtctcctgatctctgtttcctatccaccatgagacaaagaagcatgtctgctacattattgcccaagcacatggggctaagcagccatgtactgaaacctctgaaaccgtgagcctaggtaaacccttcctccttttgttctcttgtgtggccatagcaatgttaaacaccaactagtacaacctttaaaggccttagcacaagccatacacatgacacagtaactagtgctgttatcatcattgcacatggcggatgtcaaagtctttgtgtccctcactgagctgtgcaagtctatcacaggtcctctataaatatttgctcaatgactgaacctgtgtaagttggttttctcttggaacttggcattctctcctatgcaattgggtaaccagagcctggtggctcagaatcatgagataaagacctaggggaggaatttacttcttacccacagacaagctaccaaaagaggaaggatgttggttgggcaatgatagagagggaaagaaataggataggatacttaccagcaaggtgtccagggcatcaattagcgtcagagagaagctgtaaaaagacaaagtcccaactgcttcataagaacatcaaacaccagattcataacttcccagatcagattcacccaaaactcaaagaggcccagtgatgtccctatctatcccatgtatagttacaatagggaaaccagggggaaaaatcagagccctttgactacctgatggagctcaactgtaattaacatttacctatgtttcctggcattcttctttaccatggaggggcagtacaagatcgtaacatattaaaagttagagaatgctcaaggctgtgttacttaacatcaaaaagctagaaattactggctgttcacaagttgaagagtgctgaacaaactatgatacaaacaaatacaaatctatgacattattaagacatggttaccggaattctgcatactaatgagaagatcatgctgttcaatgaaaaacaccatatattaagtaagccacataatatgttttcatctgcacttcaaaaaaagaaaagccacattagtggctggacaggtggctcagtggttaagagcatttattgctcttgcagagaacctgcatttgattcccacagcaacatgggggctcacaactgctggcaactgcagttccagggactctagtcaggagccttcacaggctcctgctcacatatggtgcacctaaattcatgcaaaacaaacacacataccattaataagatttaaaagagtcctactgacagaaagcagatgtgctgctgttagggccagtattagtagagaaataatttataaggtgtgcttgggaattttttagggtaaagaagtattctagggctggagggaaagctcagaggttaagggcactggcagctcttccagagaacctgggttcaattcccagcatccaacatggcagctcacaactgtctgaaaccccacttacagggatctggctctctcacacagacacatatacaggcaaatcaccaatgcacattaaaatttcaaaaaaaaaagtattctatatgctagttgtggtagtggttactatacatttaaaataggttattttttatatggagtatataataagctactttttttttaaaacaaagttaggctttaataagttaatttttttacaaagatagccaggtctggtatatgcctgcagtcccagcactggtaatatggctgacacaggacacagactgtgctacatagcaagatcctgtctcaataaacaaataatacatctatgcacatgtgtctaacagtataaatgagaatactcgagaatgccatacaggacaggttgcggtgccagcgttctaaggaatgagagacaccaagcatgactctgtactacttcaatagccatttgcttgtatttactttttgttccaactaaaaataaaaaatggcacaagttcttagcttacttgtctagtccttggcatcagagagcatgctatcatttataaatatttgttaaacaagaataacaacccagaagtgatggtgaacacctgtgatctcagcacttgggaggtggaggcagaagcaccaggagtttgaggtcatcctcagctatgcagttgagtttgaggtcggcctgggctacgtgggacacacacacacacagacacagacacagacagacacagacacagacacagacacagacacagacagacacacacacatacacacacacacaccccagccctaattcccaggagtggtaagagaattaaatggggcgactctgaaaaacatgtggcacagtgttcagtttctgtgaatgcaaggattcttcactcagctgggtttttattctagtgaaaatgaaaaatgtgacaatacaagaattactaaaagaaacgaatcaggtgacttgtttgcatggtggtaggagctgaatctggggaggtgatagagagatggtcacatgaaacagtggtacgaagatggaggggaaatatttttcagtcatacggagaacaccaactacaaaggaccttacgtttggggagagtaacatcccctcctggacctgggtgtccacctataaaatgaagggagttgagttttctgactcttgggagatctttcaaaatattctgtgactccagaaatgtccctaagtcttcgtatgtggtgcctgttcctgcagagggtgagcccagaggtctagcctgccagattaatccaagacttttttgtactgtgaaaactgtatagactctgacagtgctggtttggattgaggggaaggggttgcatcagcccaggccggaaactttccagaatcagtgagacattgaagccaccagccctcctaggcccccagccaacccccttggccctcaagctcgctctacctgccccaggtgtcgtgaccgtcacaggtgagaggtctcagctcatcgtagggaaaggcattttccaggtaactgtcgtaggcgtggtagaacatggccttgactcgctccctggtgcgagggatgagaaataaggtagggggccagaacccaaaagcaggcgggagaaaggaccagacacaggacggagagtgggaaccaccatgtgatttccgctgagtgcccagcagcgggacccgagcacgtcagggtggggtcctggggcggagggaagggaaggggcccggtgggcgcttgccattccccagccgtggagagcaggagcctggcccccttcacctgtagtgggcggggtcgggcgcggtgccgtcggggcctggcgcaccatggtgcaggggcaggaacacgcacacgaggccgagcggaatgagtagccggaaaggcatagagctcgtgtcctgtcagtgccgccgcagcagctgcagccaccgccacccgctcatcctccgagccgctgctggttcttccggggatacgcaccacgacgcctgcgcgtagggcaataagccactcacttcctgactacaagacccaggatgcaatggaacccaggcaaaagagcatctcgggatatctgctctacagagaagagttcaacgtgtcttaaggacagtggctgctgtggctgctggtggtgatgtttttcttagtcccaatttccgtttgttgagcccttactgcgtagtaaagcgtcaaggagcactttacaggtgctgtctagtttatttttgtttttttccccaaatacctttttaagaaggggccagcaggaactcagaattagagaagatgtctatataaagatggatgaaaaatgatcagctttaaccattattaggcacagggtgtcccaaaccacttctccgatcgtgtaaataaactctagaattattctcccaaaggcatcactcttaaggtttgcagaaatcccttttgttctaggaatttatgacatcatggtcccttcagtctctaaactgaagtctctaagcattttgccagtcccagtaccccggaccatctcagtggctatagccctctgtcccgagtgaaaatgaaaaccctggcactattgctttgagaacattcctttctttctaggtcctagaatttgtcagcacgttagccacagcaacacccatcttggcagtgtgggtgagctatatagacaaccctatttgaagttacatccggctttattactactgtaccgttcacacacaacctatctacataacccaaaaggagtctttcccctcctctgggcccagcaaccatgcttataaaaggaaggatttgattaaacagatctttgagatgcctttaatttagacttttaatcctagggttgcccacctcttctttgctgaaaaagtcagagggaaatggctgttcagtttattgagtgcagtgcaggcaggcttggcctcctttggcccaacattctttttaagattattgtttttgacaatttcatacatgtatacaatgtgttctggtcactggccctccccattgccctccatcctcctctgctctggctgaatctcttctcctcagcaagcccctcctacttctatattttttgtgttgttgtttgtaacacaataaagtttagttggggctgctcgtgtgagcacaggtgaggagttatgggtaagtttagagttcagcataattttgtgactttattaagttgtggatatgagggttttgtccacatgcatgtctatgcatcaaatgcatgccaggtcccctctgaggccagaaaagggtgtgggatcctctgggactggaattacagacattgtgagccttcttgtgggtactgggaattaaacctaggtcctctagaagagcagccactgttcttaaccattgatccatctcgccagccccaatccagcattcttgaaaatatccctcagtaagtgtcccaaagtgccattagttgataagcaaattaaactctgtatctaacctagagacactgaggttctctctctctctctctctctctctctctctctctctctctctgtgtgtgtgtgtgtgtgtgtgtgtgtgtgtgtgtgtgtgtgtgtgtgtgtgtgtaaataggaaaaatattaatacctgtttaataggattgggggggggttcagtaaaccatgtaaaatgcctataacaccgctatagaaaacattgaataactaggagaatattattggaaagtgtcatggaagggccagatagaaagaagaccacaggaaactgagacctgaaaaacaagacagggacactgtatgtgtttcccaagatatggtaacaaattattatcaacttggtagcttaaaacaaaagaaatttattctcccatcttgtcttagtttgggcttttattgctgtgaagagacaacctcttgattggcaggcaataggacatcaactctcacactgagggaagcttcaacaacctcccaacctagatcacaatatcataaacgcagtgaggggtgaagccagaacagaagaattctaattcttttcaggagtaaaaaagaattttttgtctcatcagagaactgtgaaatcagtcacagaagaatcatgaaaatgtaaaaattggtttgttcattcagtgaatattgaaaagctatgtatttattaaaataggaaaagaaaataagaacctcaaccatttctgttttgttcggagacacatatttccaaatccaggcagccttgtcccaccctccctgcaaatacttcatctacactagagttctgaataggagacaaaaggctaagctacagggcttgtaacatggggaaaggcacttggctaagctgactttcataataaaggcctacgcctgaaaaatactttgtgcaaatataagataaaaagtagccttctaaccaataataatgagttaatttaagttttttttttttttaaaagaagctagctagaaacaagactaagctaaagccaagtatattaatggtcagtctctgtgtcatgatttaggggttggcagtccaagaaagcctgccacagtcatgtcttcctgtgggaaaagagagtttggaaggcacttggatcataccagtagccaaaagcattgaccttggacggtgtattgaatagagtaagcctcatattaataattagtaggtcttggttctatttctagtttagccattgtctttgtgtgattctgggtgagtcactttcccttttagggacttagtttccatatgtggaatgcaaacgaatgagactacctctcaatatatatatattttaaaaagttagcaaatacactcagagttattgcaagaaaaaaaattcagaaatcaacagtcatcaacctcagaaatcccctcagaaacactcatgaagcaaaacacaactgggacaatattccaaacagaatgaactgtttgccaaatggaggaagagaagtaggatgaggttgagcaggaggagtcgggagaggtaaaggaggaggaagacatggctaaatgtgttgcagaagtctttatatagtgatttatgtcttgcagatgtacctttctcagtactttgtatgacatcaatgccattaaccctagcccagcagtattatcaccactttagagatttctttaaatagaagcacaacttttaaaagttttatttcatgtgtgtgtgtgtgtgtgtgtgtgtgtgtgtgtgtgtgtgtgtgtgtgtgagtgtgtgtgtgtgtgtacacatgtaagtgcatatgcccacagaggcaagaagagggtatcatagccggtacagatggaattataggcactcacaaaccaaacccaagtcctctgcaagtacagaatgtctccttaaccactaagtcatgtcttcagctcctcaaagcacaaattttaaaagtcaaagagaggattaagtaaacagccttgtatcagacctaataagctttagagctaagatttggagccaggcagtccatattctaccattctgatgagaataacgaaaggccagttcagaatttaaaagtgtcagtctggtcaacttctacagcatttgatgttgttccagggtcaacattccctacacttttgttggaaagccagaaaaaatgaagtgcagtccctaaggttggaagttagacgcctttggcccatacactgaactttttcagttgagaactagctggaaatcccttttccgggatctaaagttcagaaggttcaagtgttttttctcagctctcagcacagaatttgtccactacatactttccgactgccaagaattaactagtttgttcctgggaagctctccatctgttgtcttgtagaaattcttgcatttcccctgtgcccagcatgtccaaatgttggaatggtgacttcctggccagagtcctagacatgttttcctaacacactcatgtttcatgtgaactcagccttattacagaatctataactgagatgcagtcttaaaaaaacagttaaaatgatataatctgttatacacattttatcagctttttggtactgggcattgaacctagggtcttgagaatactaggcaagcactctgctttgagctgcttcctttcccacaatattaaagaaaaaaattttttaaaggggtaaataagtgtaaaatgactgaatagccgggtggtagtggtggaacacacctttaattccagtgcttaagagacagaggcaggtggatctctgtgagttctaagccagcctggtctacaaagtgagtttcaggacagccaagactgttacacagagaaaccctgtcatgaaaacacacacacacacacaaagactgaataaaattacaggacattccatggcattactgccattgtaggaagattcaattcttaaaaacaaacaaacaaaaaaaaacaaacaaaaaaaccctatttttattgagcagaaagtggggatgccgagaagatattttggcaatgtctgaagcagaggctttctcggttggtttgacaaatgcaccaagccccatatcacatcaagctgaggaggggaggtaatacttttcccctttagccttctgttttgtggctccaaattctgccacttctcgtttgtgcaagaacagaagaaatttttgtagaggaaaaaaaaaaagactctaataaaattctaattctttcaacaaaagcttgagccttgttgttttcttttttaatggttgctgccttttaagctacagctatcctattcagtaactgcaacttggatgctaccagcagctgctgggctgcaagagctggagcctgaggaaattctgttccctcaggcacccgactctttcaaagctactaaggaaatttatttaaatctctgtcccactaaaggactcaagattcaaagcttaaggtagaatcctgattcccagagagcctgaatagcaagcagctcacctcgcgtctcccaagaagttctcatgctttttttcactcctccttataatcccttctccacctggctccttacagcttcctgtcagctagttgctgacccagcctcctgaccgcaggtgaattttatttaatcaaacacatctttgcgtctttaaacaaatgttccagtacataaacaaaattaacgtacctgaaattaatattctgcaaggccttgtaatcacagcttctaggtgtcttgtgagttaaaataagtagtgttaaaaagaacaatgatacaaaactgttcctaaggcaagaacatgattgtcagacatttgcggggcggggagatctgggcatagtggtatacacgtttacctttttctttatttttattttatgcgtgtgggtgttttgtctgcatatatgtctgtgtaccacatgtatagtgttcacggaggcagaaagagcaaccgatcccctggaattagagttgtagatggttgtgagctgccaggtgggtgttggaatctaacctgggacctctcgaagagcaaccagtgctcttaacctctgggccgtctctccagccccatgtgacattgtgatgtcatgataaatcattgaacagcaaatctatgtaagagtctctgaaaccaggtatggtaacatatgctcaaaatcccagcactcaggaggctgaggcaagagagctgagagcataaggccagcctgggatacctactgagaccctgttcaaaaacaacaacaaaaagaccaacaagaggctggagaaatggctcagaggttaagagcattgactgctcttccagaggacctgagttcaattctcagcaaccacatggaggctcacagccatctgtaatgagacctgatgccctcttctggtgtataggcaaaacatggagacagaacattgtatgcagaataaataaatctttaaaaaaaaaaaaaagtctaacaaaacaggtatctatctctgaaaagaatttctttttttatcatcaaggaaagcctagatagtggacaattccagaaactgatagcacagaagagaactccaaaggttgtgttttattgtgctgggggtcatttaaccatcttgcattttacttagcactcttaagtcaatatttttctcttatattgattatgaaaactccgttttttaagttctgttttaagttggatttgtcatcttcctgttctcttcattgatgagttaaatgaacttgtgactcatgcttactttctatttttataaaaatgtcgttgttcccagagaacctaggtaacaaagaggaccccaagagagacatacatggatctgcctaggaaaggtaagaagacaagatcttctgagtaaattgggagcatggggggcacgagggagatggaagaagaaaggggaggagagaaggaaaatgtatagctctattaaaaaataaaataaaacgtcgttgttaacatgctgaagactatccttggcacaaagtaccagaccctgtgatgaataatgtacagacccatgttacccctttgagacagtttctattttattttatttttatgtgtgtgggtgttttgtctgcatgtttgtctgggcatcaagtgtgtgcagcacctttggtggccagaagaaggcatcagattccctggggtctagttacaaatggttgtgagctgccgagtgagggctgggagtagagcccaggttctctggagaatcctcagtgctcttaaccaccaagccatctctccggtcctgagagagtttctgtttaatcctcactttccagataagaagccagaatctcagaaaaataaaagtgtgcttttagtaccaagaggttgactaatcacatttttctaattcttccctagaaatcgtatttgctcattgacttaggaagcatctcttgagcactttaccatgaagctggtactctgccagtctggtgatacagacaaggctgctgccctctttggtatggaagacaaaagcattcaaaaaaagaaaatgtcatgtaggagggttaagaaaaaaaaagggggggggtaggtttctgagaaggaagcaactgattaacagaaatgacctgtgatcaggaagggcttttcaagcttcagtacgaactggtgcgtggccccattgcagcagtaagtgtaatccacttacaaggaaagcatggtcacctagctggaagagagtgggcaatgctgtaaagcaatgagaaacaatggtggcaagggtgggtgggcactagatgacacaaccctttgtaaaaaacagcagggaacttggactttgtcctaagtgttatcaatggattttcaaggggcagaggagaaaacagaaaaaaacaaaacaaaacaaaacaaaaagccgggaggggtaggaggctaggaagtcaccaaggtggtacagggctgtaatccctgcaggtgaaagatcaaggcaggagggtcaggagttccggttaaatgctcagtaaagtgtttgtcttgcagttcccagaatccacagaaaaatactcgaggttagtgagcaggctcagcagacaaaagtgcccgctgccaagcccgacagcttttcccagcctcatgcggtggtaggagagaactggctcccaaagttgtcctccacacgtattttgtgtgcatgtgtgtgcacacaccgtagatataaacgttataatccaattcctttttaagatgttgggtatggtggcaagtgcctgtaattctagctcagaagtgacagatgcagggagacagatgcaggggaattcctgggcctctctggccaattgcctgtgccaagctccaagccaataagaaatcctgtgtaggcagagtctatcccacctgcagctcccaaataaccacaccgaaacttcctattaattatgaaagctcatctgatagcttaggcttgttactaactagctcttacaacctaacctatttttattaacctatctgttgcactgagactcgtttacctcatccatgtactgcccatcctgctcgctctacatctcacggtgtgtctgatttcttcttcccagcattccccctgcccaaaaatcctgcctacctattggccatttagctttttattaaaccaatctgagtaacacttcttcacaatgtacaaaaaagatcatttcacaacaaccctgtcttcaaaaaaaatgtagatggcattcctgaagaacaatgcctgaggttgtcttctggcctccttccatggtactggtatgaatacacacataaacatggggaaggggagacagacagacagacagagacaggagacacagagaaaggggcagagatagctcactaggctgggctacatgaaggtctgtctttttgaaggggagtggtgtgggagatagctggcacactcagggaatcccagcacttagagaggcagagacaggagttaaagttcaaggccagcttgagctacacagtgagacagtctttaaaaaaaaaaaaaaaaaagataactagaaagatgtctcagtagttaagagcatctactgttcttccagaggatgagagttcagtttccagcacccacatcaggcaactcacagactcatataattttaggttcagggtacctgaaaccctctgagggcacctgcatacacgtggcatacatacagagagaaacacctatacgtaaataaatctttaaaaaataacacgaaaaaacaaataaaaattaagccaggcagagtgacatgcacttgggaggctgaggcaagagactcccaagagttagaggccagcttggaacccagtatcagaaggggagggagttcagggggcaatgcgcttgccacacaagtgtgaagacctgagttcagttcccaacacccaggtaaaagccagatgtggagtctggaatctcggcactggggtgggggagcagagacaagcagatccaagggcttgctgcgtagtcaggccaacagattggtgaactctggggtcaggaagagaccctgtctcaaaaaccctgtctcaaaactagggtagaaagtgacagagggggaaaaaagacccagtgttgatctctgtcctccacacataccaccatgggggagtgcatctgagtaacgagttaattagtagcataaaacttaaaaaggaggaaatccactatcgtcatctgtaggtgctgtgtctatccataaagtccataaatatcagtcaagtgttagattaaatacaagttcattgaagttactagatgcaaaattaacacaataaaattgtcagcatctctgtgagaaataagcagtcagaatatgagattttctcaaatactcctttcagtaacactgatttctcacagggctgacacaggaggctcacttgagtccaggagtttgagaccagcctgggcaacatagcaagactctatacagaaaaatacgtaaatgacatgatctggagagttggctctgtggctaagagcacttagtctctggtggaggacctatgttcagctcccagcccccacatggcagctcacaaccttctgtaactttagttacacacacatacccaaacacagacagccatacacataaattaaaaataataaatataattccttttactgttgatgtttttctgagacatggtttctctgtgtagctttgcctgtcctggaatttgatctgtataccaggctggccttgaactcagagatctaccagccactgactcccaagtgttgggattaaaggcattgcatgtagtatgtcaaatggctttggagagaacagatattttcacagtattcaatcatccaatcacaggataaggtctctctctctctctctctctctctctctctctctctctctctctctctcacactctctcttatatctnnnnnnnnnnnnnnnnnnnnnnnnnnnnnnnnnnnnnnnnnnnnnnnnnnnnnnnnnnnnnnnnnnnnnnnnnnnnnnnnnnnnnnnnnnnnnnnnnnnnnnnnnnnnnnnnnnnnnnnnnnnnnnnnggataaggtctctctctctctctctctctctctctctctctctctctctctctctctgttacaatttctttgacatctcttagagttctataatttcatttctaagcaccttacccatgctttgttagagtttttccttagatagctcatatctttattgtatttaattatttattgaacttatacttatcttaaaagttaggtatgtatgtgtagctgcatgactctatgtgaaatgagctagtcagggatataaagttaaggacttccaagctatctaaaaatatgattaaagagagtgaaaggatagcatgcatgcattctgtattcaggaaaccagggggagtgagtttggccaacaggaatccagggaaagataagactggagaggatggtgggagtcacccaacaccaccaggtacctgtcaatcgctggggctggcagagacagttaccctgacctcctgcctctgttgacgcgcgacccatatgccccgtgctgaagtgtgctgggaactgtgcctgcgcagaacatcctaagacttccagctttctatttctccttcttcccttaaggaaatcacactttattcacatctaacttccactcttcccaagccacagttccactggctgtctataaagcctagctcctttctcacaccccccacctactcagttcccacagtgtgtggacacgcatgatccatacgatgctaaggaagaaagcatgctgggtgttacacagccccacctctgaccatctgggtatcttagcacggctgtgtcctcacctgtaaatgggagttccctggctctgtgtgtgtgtgtgtgtgtgtgtgtgtgtgtgtgtgtgtgtgtgtgtgtgtgtgtatatgtgtgtgttgagaaccaagcacaagggctcccctcactcaacagtctctggacattgtaaacttcctgttggtggtggtccctggttctgggggagtggggtgggcacactcttgttgtggagttgagccaggtagggtcaggtctgtcttcaggacacagggaagggggagtggatcctctgaagtgcagctgggcacacagcccagccttggcaggggcactcctcacccaccggggctgcaccagcactggccccagcctgtttcctgtttcccttatctttccccaacatgtgctctccggggtcagaaacactgccatttgcttccttcacttccgtttgctcaataagacccttatttttcagattctagtcaaatctggctgctggcccagagcccactacagtgtgtgatttttcagcccctcggctccaacggcagcatttctgggtttagatggaaaacttctcaatcggctcctctcagctcccagcttatttacccctactcttctactctctccctcctcagccccatggcctcatcctctttgagttccaattctgcttttagttcccaagtagtgtgacctgtgtgttccctcacttgtcctgtctgtaaagtgaggataatgacctcggcttccccagaggaagtgagcacagggctacgttagaaatgagcatacattaaacagtcaagaatgtcagagtcatgcactcagaaatgtatgttgaggtctgtgtgtgtgtgtgtgtgtgtgtgtgtgagagagagagagagagagagagagagagagagagagagagagagagaaggagagacagaagcagagaaagagagacacagagagagggagagatagagcgagagagacagaaagggggaagagagagacctggggaagtgtttgcctttcaagcatgagatactgagtccaatcccagcattcatataaaaacgtcatggcacaggagcagaagcaggagggttcctccaagccaatgagaggccttgtctcaaaggaaggactgatgagcaagaggtggctcaacaggccaaagtatttgccaggcaaagctgagggcctgaatttgattaccatatgctacagtggagatacagaaccaactttaaaagttgtcctctgactagcacacgcatgtgcctacacatgcatacacaccacacacagacacacagacacacagacacacagacacagacccagacacacacacaccacagacacactaaaaataaatgatcttcaaaagaaaagataaaggaggttatcttagggtttctattgctgtgaagagacatcatgatgacttcaactcttataaaggaaacatttaatgggggttttgacttacagtttcagaagtttagtccattattgtcatggcaggtggcatgcaaatagacatcgtgctggagaagaggctgagggttctacatcttgatccaaaggcagcagaagtagtctgttttccccactgggcatagcttgtgcacaggagacctcagagcctgcccctgcagtgacagacttcctccaacaaggttacctccattcaaacaaagccacacctcctagtagcgccactccttttggggaccatttttttcccaaccacgacagaggtaggtagtattcctgaggatgacccctgaggttgtccttttacattcatgcacatatacacacatgtgtactcacacacatacacacaagtacacaaacccctgcatacacacacatacagatgcattaaaaacttttcatattacagtatgaagattaaattaataaactttggcatcgtaaaaaaaaaaatcccaatgacaacttttgctgtgtaacctgaggtaagtcatttaacttctctgaaccagattctcttagtaaaatgctagtgttgataaaacccacatcatagaactgtcatttgggatagaattatttatgaaagactggacactgcttccagatgcttaaatcaaaggcacgggacacgggaggggagaggaaccccccatcctgtcactggttaaagcatcttaccaacagcaaggaagagctgcagtgcagttaacagatgctcaaggcctttctcccttcctagctatcaacctgcaattttctaggaatgtcaccagaaactccacttacaggaagggacatggactaaaccccttgtgcaacactcttggctcctggctttaccttatcagagtctaatttgtcagaagacctccaaagccagtataatctcacctgggaggactggagagatggctctgcagttaggacctgggttgattcccagaaggcttacaacctttcttaacttcagttccaggggattcagtgccctcttttggcttctgtgtatataaccacacagtgtatatacatacacacaggcaaatgttcatatgcataaaataataaatagaatgtttaaaagcaagagagagaaaaggagggaagagccttcagcaactttatttatttatttggggtgtgtgtatctgtgtgtgtgtgtaaggaacaatagcagctgagccgctcacttatcaaccttttgagatgtaactggagagccattaaaatggtgtatatacagttaccactaaggtagtctgattgtgagtgtcctttgcggagcccagagccactctgtctattttcctttctgctgctccctcttggagaagcccatgcctgtgctctgagctatgtcttcctttcttcttctccttttcctaatctcgcacttaagcctaccttaagattgcttgcgtaaaatctccgtttcatcacatgcctgcctgtcctgaaattcttttcagtgccaaagccatgaagcccggtttagcccaagtcaagatttctaaatatctagggaaacccaggctgccgagggtgacagtgtggatctgggcctccaccccctcaccactgacaccagccctccatcccagattgcatgtgaataatggttgaagtgtgagattcgtttccttcaattccgaaacacttttccaggacgcaaaggacgaaaagtcaaagcgaagagacacaggagctcattaggaatcagcaaaagtcaagccaaattcaagtgccgtgttacaccacccacctggtgctaccaagggctggcaaggatgtgaagctgggaactgcacactgctgggaatgcaaattagcacacatctttgtaaaagattttggcaaatctacccaaattgaaaaccatctaccctgtgactcagcaagtccacgcccaggagtgcagctacacaaactcatctagacatgaggaatcacgaacatgaatgcacatgtcagcactgctcatagcatgcaataaacaaataaacatacatgtcagcatggggagatggctcagtcaaaaacctgcttgcctttcaagcagggggacctgagttcgggtcttcagcacccatataaaaagcccagcctggcatggtgcacctgcaaccccaccattggagacacgaagacaggaggcatcatgggcttgctggtcagccagtcagtaagctccaggttcagtgagagaccctgtctcaaaaaatgagatgaaaggctagggaaatgactcagtggttaaaatgcagaaccccagagctcaggcaaatgaaggtgggcatggtggcccacctataattctgggctctgaagacagagacaggactccccagagcaagctggctagtgagactagctttattcaagcttggggggggggagactaattaaattcaatggagagaagcctcatgtataccagagtcagttctctccttctacctctgggttctggggagcaaactctgtcaagtgtgttaacctgctgagccagctcactgacctcagtctctaggcgactgagtgacaatggaagcatgaccaaagaagatcactgatgtcagccttgggtttctgcacacatatgtacatacatgctccctttcacattcatatgtgcctacatacatgtgaactgaatgtacacatgcacacatacaacacatgaaaagaaggaaaaagaatgagatagagagcaattaaggaagacacgcatatgtacttgtacatatacacatacatacatgaacaaacacaaaaagtaatgtccaatatcagatggtgaataaatagtgatatattcttttcaggtttgtttgactttatgtgtgtgaatgtttgcctgcatgtgtgtctttgtatcttgtgcaggcctagtaccttcagaggtcagaagagggtgttaaatttcctggagttacagactgtgagcatagttaaatccgtgagctgctatgtgggtgctgggaatcaaccctgggtcacctggaagagcagacagtactcttacctgccaagccagctttccagcccccaatggcagtgcccttaaaatggaatgtgttaaagctgtgacaatgactgtacatatacccaagtgagagaagcagattgaagaggactaatgtatgctagtgttatttccacaaagtagaagaagccaccatatcatttaaggtgcatggatatacggcataagtatacagaaatgcaaagaaatgaaaaaatagtcaattttcattttcatttgatgtaattaattcaggggccaatatggggaagagagctatgagtgaatgccatttgagttatcggtaatgctgtatctcttctcggtggaggggacagatgtatttagaatgcaattctatgaacacgaagcaataattcttccaatgcaaggcagttcacaatcatttttgaattcaagacaatgtgattagtcatgatttaaatcactcctctttgaagcccacccccctccggtcttcaatccagagcaagatgatgagctataaaatctgcaacgacagagaggtgagcatgggagtgcctaaagaaacagagaacgggagcccacacataaccatggcttgtcccagattccactatgacagcaagaaggataccaaataaaaagttatagttcctctattggcctttgttctgcaggggcaaccttgagccctgtcaacctccagacattctcctgtgcattccaacagacagacagacagacagacagacagacagatggttaggaaacatgggtgggattataaatccatttcttgggcagcagtgcattttaaaataagtacaacgtgggaaatgctgctatctgtatttggtccacaatccctatggcaccatcagtgtcaccctgtctgccgtcctttcccacaccacggattatcttaacgtagggatgtaccttaacctagtattcaaattcctgtttttaattaaacaagaaatatatgatcatattctagacataaaatcagccatttaaagcaattatatttataatgggaaaaaccctttgcaaaatagtggtaatttttttcacaagattccccactcctatctcagtctctctgtgtctttctctcccacctttctcctcccccttccttttcccctctcctctcctcccctcttctctcctctcctctcctcccatcgcctcccctccctggaaataaactgctctaatacatatctttccagatttgtttgcttccatacagaaacaggtgtgcttggttattgtgtggctgacagatgaacaaatggttctaatatgcatatagtggtctataatttactcctagaaatgtgtacaaatcatgacaagctcaccctgtcattcgtctagctgatggttatgtgtgacgtgcgtcattggatcagcatggagcaagattgggcagcctctattcccatgctgcttgcattttggtggggatacagacaaatatataaataagtaatacaactttcagtgatcctaagaaatatgaaaattaagtgggggttttgaagggaagtttttatttttgtttttgcttatgagtagtatttcaccatagggactttcctaatttgggggactgactttaaatgaatctacttgcttcccaaaataatatctgcatttcatactgccatccaaacccatcattgaaacatatccacacatcaatcaacacatgaatgaataaaaactgtggcttataagcaaaatagaattctatttagccaaaggggaaattacattgtaatatttacaagaaaacaaatggaacttcaggtcatcttgttaagtgaaataacaagatttggaaagacaagtactgtatgttttctctcatatgtagagtgtgtgtgtgtgtgtgtgtgtgtgtgtgtgtgtgtgtgtgtgtgtgcgtgcgtgaaaatgccataatgaaacccattgctgtgcatgctaacttaaaaaatgcttaaaaggccaggcacagaggttcatgtctttaaatcctagttcccaagaggtaggggcagctggatctctgtgagttcaaaatcagcctgatatagatagtgagattctgttttgtttttttaaaaaaagaagaaaatacacaaacccaaaacgcccttatataagtgaacacatatttcaggaaatattgcttactaagaatgatgcaccaaatttcttattctgttctacttcataaaaaaaatttaaaaaaccacgttaactgtgatgtcattgtccactaaatgactatgacctgcttgatgctgagatttatctggattgttcgtcaatctctgttacaaataatgagctcctatatactcactgggttctgtgactatttctgagagccaagcccctgattgtgtaattcctacacttaaacttctgataaaatatagacagttattctggaaagctaaattccaatcctggatctgccgtcatcacgacgtacaaactctgggcaagtcccaccatctcttcggacctcagtttccccatcagtaaccttatgatctctacattcttggagtcgcaacaacgaaagcagacgccccaccccctgactcagcggacttctcaccaagcccttctcccccttttccgctcttcctcaagcctcggaagcaagcagcgggagaagggaacaggcaggtctaggcaggagggcccaaggctgggaggggccgaggcgagccggccccctagtaggaaatgaggtagatagaagtaacactttaaaagcttgactccctcttcctccaggcattcctggtctcttcccaccctcggctcagctcccggccctcccggacagcttcccttctcgtttctaatctgcagcctgcagagcccgagcctgccccggcccaggtgggacccagaacttctgctccaggatgttgacgaagttgctgtcgctgctgctgctgctgctgcctggctgcgccttttgtaaccaagaagactcagatggtgagttagggacgcggctcctgcctggggggtgttctggagacttggtgtatttggaaactttgacgcgattgtagggcagctaagcccgccgcatggctgtctacagctgctagggtcactctacggtgcacgctgggtcctgggcatcagtttatgttccaaagacaaggcgaagaagttcaggtaactttcaggaggctggtggaagggacctgtagagagagagagtgtgtgaggatgaggagaggagacagagcagagtgtcagtctggcgaagatagaagagaatcagcgaggagttgagatggagagaatgggaaaacatcaggagaacggagacaagtttggggattgagatggagaggtagggaaagaggagaaaggctggaggtgtagctggtgaggtgggacctgggcgggagaagagcccagggccggaaggattccgcggctggaagctcttgaagctaccaaccagcagtattcagaatgcttactgtatttaatacacacatcgactcgtttatgttaccgcattgatctcacggaggagaaagctgggtcacagaacagataaggaatgaatgccgctaaggttactcacaccctaaacacagaaagcaacttctcaaatgcaccaccgggtgggggtggtttacgatgtcacacatactcatccagcgattctcctgataccaatacataccgccaaggcacttttcggggtattgaaggcagggatgaccaaacccagtttaacagctaggaggggtccggtgtgtttgggcactaacattaggaatcccacgaaatctgtgttgatgcaacacactttgctcagacccacttgaaaaggaggggggaaatggcagcatcgggaaaagggctccaaggagaaggccatggagctgggtcttgaaacacagataaagatctgccaggcagaacaagggcaggagagcaaccctgatgagctctgcacacagtggccaaaagtcagcatgaggaactccaagccatttgatgaaactgaacgccgagactggccagaaaatgcagctgtagccagatcacttgctgtggatcccaaactgggacagactccgagatctgtcccgtggatgggtgctttatggggaagcaatctatgactccagacaaagaccggtaggcttctgctaccagtgttcaaatacttggcttgcctcaccatgttagcctcagattcccatacacatggggttaataacagtagctactgcgttaaggcattaggaggaaggcatgcataagttaataatgtgtgcagagcagcgcccagggcgtgacaagcccttaatggatattagctattattatttgggaggggtagggtatgtcactggcgggctttaagggagttgggtcaggtggagatccaaaagggtgaaattgagaaacaagtttctgtggcacccaagcccagatgacagtgtcccagaagaaagggaactggggctggaattgggattttatcataggctggagtgtgataggctggacatgtgagggaggaggcaaagacacagagggatgccttttccaactgcaggccttagtttcctcgtctgtaaagcgaagataataatccccgtcctctcctggcttggttgttgtgagcatcaaataggagggcaggtaggagagtgctttataggattgagaaacgggcggcaggcctctgggtaaggggttattatctctggctgtcagccaccccttccctggctggaggtcctgacgctgcactgactcttcccccaggctcccaaagcctgcatatgctccagatctcctacttcccagaccccgaacacgtgagacatcagggcaatgcctcgatggggaaaatcctgacacatacactggaaggccccgccaacaatgtcaccatcctccagctgcaaccctggcaggatcccgagagctgggagaccacagagaagggcctgcagctctacctggcccaattccacagcttggtgcagctggtgtatcgcgagcgcaagaacagcgtagtctgtgagtggggatgctgggtcggggctggtgggagctctggagattgagagggttggggggcttgtggcggagctagggtgctaagtgcaaggggaaggtgggcgtggtctctgggtggggcttccctgaagagccctggctggcccttggagattgttctgtggggcctggaggtcctaagagtaagaaacctctattagatagatagatagatagatagatagatagatagatagatagatagatagatagacagatgcatgcatacatacatacatgagagagtctatcaggttctcctccagtgacctctcagagcagaccttcttgggggaccctgtccctgatcctctctgacccccaaagtttcagtgactactctgccatctcctttccctcatactcggccctgttctcatccatgttgatggtcccacccacagctccctcacagccccgactcctctcaagtactccattgatttcttgtctgggaagccacccgctcccttccacatcacttctctgctcctttctctcatggtctctctcttcatagctcctgggtcctttttagacaggctccaacagtctagctttccagtcagaaccccttccttcttcctttcatgccccccttgcctccggtgaacatcccccactcctggtaccttctcaagcaagcacagaactgagcctccccccttccccccccccccgcagccctctcccccaaacccgctcccccccctgcgggcgcnnnnnnnnnnnnnnnnnnnnnnnnnnnnnnnnnnnnnnnnnnnnnnnnnnnnnnnnnnnnnnnnnnnnnnnnnnnnnnnnnnnnnnnnnnnnnnnnnnnnnnnnnnnnnnnnnnnnnnnnnnnnnnnnnnnnnnnnnnnnnnnnnnnnnnnnnnnnnnnnnnnnnnnnnnnnnnnnnnnnnnnnnnnnnnnnnnnnnnnnnnnnnnnnnnnnnnnnnnnnnnnnnnnnnnnnnnnnnnnnnnnnnnnnnnnnnnnnnnnnnnnnnnnnnnnnnnnnnnnnnnnnnnnnnnnnnnnnnnnnnnnnnnnnnnnnnnnnnnnnnnnnnnnnnnnnnnnnnnnnnnnnnnnnnnnnnnnnnnnnnnnnnnnnnnnnnnnnnnnnnnnnnnnnnnnnnnnnnnnnnnnnnnnnnnnnnnnnnnnnnnnnnnnnnnnnnnnnnnnnnnnnnnnnnnnnnnnnnnnnnnnnnnnnnnnnnnnnnnnnnnnnnnnnnnnnnnnnnnnnnnnnnnnnnnnnnnnnnnnnnnnnnnnnnnnnnnnnnnnnnnnnnnnnnnnnnnnnnnnnnnnnnnnnnnnnnnnnnnnnnnnnnnnnnnnnnnnnnnnnnnnnnnnnnnnnnnnnnnnncctggtaccttctcaagcaagctcagaactgagcccccccccttccccccccccccgtagttcctctcacaatcacttgctccctgggctgcgagctcccgtccaaggagcagactgagagcaccgaagcccgcgtcttcttcgatgtggctgtgaatgggagctcctttgtaagtttccagccaaagaccgctctgtgggtgatgcgcacccaggagccctccgaagctgtcaccttcaccctgaagcagcttaacgcctacaatcggactcggtatgaactgcaggaattccttcaggacacctgtgtgcagtatgtggagaaccacatcatcacacaaaacacgaaaggtatgaggaggtttgggccctgcctgtgtgtggggagagggggcagcttccaggcaagtggacagacatgaggtatcccttgtgtaacaaaaggaggggtttggagactgtgcgagggtatatgcatgacttaagtctctgggtgaagtacagatgccttgaggtttgagccaaacttgggactccttgggagtattctcttaaactcactctctgcctgttctgcagggagccaaacaggccgctcttacacttcgcttgtcctgggcatcctggtgggcactttcataattgctggcgtggccgtgggcattttcctgtgcacgggtggacggcgctgctaattactctcgagtcccctcggaaaaagggctggactgaagggggtggtaagggaaggtcacagctcatagaaagccaaacagactcccccagcgggccaccggatctcaggagatttagagcaacaattcactttttctcctgcagctgccaaccagtttgaggaaggggtgtaaagagggtatgtagacaaagcacttgagagcaacaggcatgctttgtttaactggtctgagaagcggtgcttgcttatctgcggaaatcagacgatagacttggggtgtctgtgacctccctgcaaaggcagattcactggaggcaccccaacatctaactaaataaaatgagttgcctgtaaccaagataaacaacatttaatgttatctaggtgcgtacaacttgagaagggatactggtctgaaagaaccagagaaatgtcacaattgtaagatcaagctatatgggagaacaagtaataattaattaaatattaaatatcttatttatgtaaaaggtgtaattatttcctccattttattaaaacttctgaaaaaaaataacctataccctttgttctatttcttcatctgtcgtttgctcggaaaccagtggtgtcctctttctatgaagtagtcaaagatcgccataacctctattgtcatcatatcctccaaaatgtgtgagtcattgactctgggagctggaaactctcttctgagacactgtaattcataaaactattctggaattcttctcaacctctttgcctccattcaccttggaagatgctgtctttcttcttttttttcccatgcactgactttaaatatctatttctcgtggtttctgtggagcaacaagcatgtgtttggagctggatagatgactcagctctttcagaagacctgagttgggttaccagcacccaggatggcaggaggcgcactcacaactgcctgtaacttcagggccagggagtctggtggcttcttctggcctcctagagcactagccacacacacacacacacacacacacacacacagaattttttttttaatttttaagaatttatttatttatttatttatttatttatttgggacagagtttctctgtgtagccccagctgtcctggaacatactctgtagaccaggctggcctcaaacttgcagagatccacctgcctctcccaccccacagagtgctaggattaaaggtgtgtgccactccttaccctcaatgagaagcctatggggagatgggggggtgtgaatgtagggggagaaggaggaggggaggggggaactgggattgctatgttacaaaaagatcaataaaattttttttaaaggtatgaaccatcaccactcggctttaagaacattctaaaatcagatttcagctttacatcttggagtcaggcatttaacttctccaaatctttcttccttaaagggataataaaatacacaaaaggatataacaaaatatctacctcaaacacacattatgggtatcaggtaaactaatgcaagtaagataatacatacatcatgaatacagcaatggttacctctccaaatcccatatttgctctaattttttcccaaaggaccaactccaaggcttcacaaagattaggcaggctcctgacagtgagcagcaattccacccctacactgacttctatgctttgttttagacagggtatcactatgtaggccaggctggccttgaacctgtgatcctcctctctcaacccccccacccgttgtggattataaatatgcctactgctcggtttcctttgaacatgatctctaccttaatatcttgaggatattcaaagtcaacatatgaggaatcaatgttattaccttttccccttttctccctgttatttaatatgtgttaataggtaaaagaaatacattcacatagtatctgtgtagagacctcagtggtaagctctatttacttacttttctttatccccacctataaagtgcaaaatccataggatccattctctctgtactgcccttcctctttctctgtgagaggcacagaggtgtgctgcccaccttcagggagtacagccagcaggggtcctcagccacttcagttcccagtgaccacctcagctacagagaacagtccagcacaagggcatgcctgtcctgtgactgccctcccctgtgactgggcacagcagaggtgtggacacccagctgtgccccattactccagagttccctgccgggttggctgggtctgtgtgggatctacaaagcagtttaacttttcctcaacttgatcctgcttcctcttccagtaaacatcctgcatctccacctctctctcagcatctgcttccagaaaactcaaaactcgacaggcatgtatgtgtgcccctcccctattctgtgtctcctcaccacaccacctgctctgcccaaactgagaaatgtccggtcttttttgactagaccatgcaatagctaaatgctcctcctaagtgctcccttgtctgtaattgtttctttgttcgaattcatcttatacatggcaataaaaaagggggcaaattttgaaaagtctgtgtcatttctgcttttttgttaatttcccattcttcttgaataggacacacacacacactacacacacatgcacatacacacacagatacacacacacacttacacacacatatacagacacgcacatactacacacacatacacacacacatgcacatacacacacactaccgcacatacacacatacacacatacacacagtaaacacacacatacatatacacacactatacacagatataaacactacacacatacacacactacacacacacacagacactacacacacagacacacacactcacacacatatacacagacacacacacactacacacatacatacacatacacatacacatacacacacatgtgtacacacacatacacacacactgcccaagtgctcactactgtctaccaggcattggtgaggatggtccagttgtggcatccttaactagaccgctcttttgtgctgtgctagtagtctcttgttctgttttctgagcttgattcactatcatcattatcagtttatttattcatccaataaatgtccatacacagatttgatgctatgtgcattggaagaaacaaagtgattaaggcatggtccttctcaaggaagaaatgacataggattaagtcccacacaaggcagatgttctcagggaacgtaggttagaggaagccacgtacaaatgcaaatgctattgttatttacagttttagctatcgcttatacattgttcataatttttatagttctttaatatgatttgtcactttaaattcagtgaagtctcctaagatacgaattcttatcgtatcttaggtaaagggctcaacaagtaaagctgcttgttaaaatccgttttgaaacccacttagtaggaggaaggagagaacctactctaccaagttgtcctttggctttctgcacatgctccatggcccacccacactctcacacatacattttccatacacaataataatgaattttttaaatttcaagaaaaatgcatagtatccttcttaggaaacatgctaccaacaataaatagagtggcagaacagggtttaaaaccatgcccttgtgttctgacatttgtgctttctttcatctagaactgaggaaatcagagcaatttctagggaagtgcatacatatccacaacacacacacacacacacacacacacacacacacacacacacacacacatagacagagagaatttaaaataaatccttaaaaagaagagtggacaaagggctttgctggaaatgaacacgctcacctttaaaaggtatatggccaggcaacatagtaagatcctgtctcagaaaaaaacttattatataacttattatataactcatcaacttcactctttgtatttaccccgaagaattgaaaaaatgtgtctacatgaataattataaacaaatatcatagcagcattgttttatctgtaagataaaaacaatgcagactactgctgctttatcttgctatgggatgtgccaagaatcataggttgtagatgtaataggattattttgagtgtgtcttgattcattttctgatgctataacaaaaatctgaggctgggtaatttcgaaggaaaggaggtttacttagttcacagttctgggggttagaagtctcaactccatgtgtgcattctcaggaaaggaaggcccttctgactgtgtcatgtcatgatagatggcattacatggcatgagtgtgtaccaaagagatctcccagagaaagagacagagagagatgggaaaggactcactttcataactgctgctctcacaggaactaaaccactcctgtacagtctaacccactccatgagactggcatgaatcccttcccattgacaccatagctgggtcatctcccaccacagccccacctattaaaggctctttgaatatcatggaggtagaaactaagtttaacatgagtatcttcaaatgatttcgaaagggttctcagagcttttgtgtccacatccagaaacaggaggtaaaggatcaggaccctggatgagtcaccttggtccctcacttcctcaagagaagggtgactggaaattcagctgacacccgagcagctttcatggctgtgtgtccctggtgcagtcactactgctctgtgggaagcagctgtgatttcaaagatataggccagttctgacagtcagggttctagctcctaactccaggcagctgacctctgggcagattcttaagggtccttgatgttcctccatcttcagagaatgacctcaggatgtttgccttaagtctgagccttggcagccaaactactgaaagcccaataggagtttacatgagaaataaacaaatctggaacatatttaaacaagtgactcccaagagcattctaaaacccttcttctgggtggcctgtagtccccatttaacatcaaacttgagtgtcttcattgtttgcattctgccaggtagcctacctctaggcatctgtagccccttctttttttctttatacttaaaaaaaaaaaaaaaagacatgctgctgatggtgatggcacacacctttaatcccagcactggggagacagaggcagggggatctctgtgagttaaaggccagcctggtctacagagctagttccaggacagccagggctgttacacaaagaaaccctgtcttgaaaaaaacaacaacaaaaaaagacatgtgtcttagttagggtttcaattgctgtgaagagacaccatgaccacctcaactcttataaaagaaaaacatttaattggggtggcttacagtttcagaggtttagtccattgtcaccatgctacaacatggtggcatgcaggcagacatggtgctggagaaggagccgagagtcctacatcttgattcacaggcaacaggaagtggtctggggcactgggtgtggcttgaacatatgagacctcaaagcctgcctcttaggtggtatactttctctaacaaagccacacctactccaacaaagccacacttcccaatagtgccattccctatgagcttatggaggccaattacattcaaactgccacaacagtgtttcactatgtagttctgactggcctgtcacttgctttgtagactatgctgacctcaaactcagagatccatttgcctttggatcctgagtgctgggattaaaggtgtgccaccacaaccaacaatagcccatgtttccagttcattgcactattggtgggatctattttatgctaaacatcctggtaactgctagtggggagaggagaaatgggtaagacggagtctctgtggagccactcctaatctagagggagaagtacacaaaacaacaacaaagatgcaaaatgagtttagctgccttcccaggagaaagaatcccaggaaagcacacaggccaaaggcctcatcagggcttgaagaaaaacaatttccacagggaaagaaggggaagccattgctctgctcttaggccaagatctctgttcatctctgtctagcacaagaaaggagttcagaacacatttgtcaatgaatgaataatgagtagattctgaactgatataacagcacccaggaagagagtacaagagggttagggaaatggctcggtgagtatacacctgttatgcaagtgtaagggcctgagttcgtatcctcaggacccacattaaagctaggcataatagcatgcgtctggaattccagtgcccctacagggagatggggtgtgtgcagagaaaggagaatctaaagaaacatgtgggccagctagcctggtgtacacggcagcaaaagtaacaacaacaaaacaaacaaacaaacaaaaaccagacagtgtctcacatatggtggaagacaagaataccagggatagttctctgacatccactgtggcagcacagcacacacaccaatattcacagatatacacacatcatacacataggaggtgggggaggaggagggagaggaaggaggggaggagggggaggaggaaggattgttctcgatacagtggtaaggtctagtgtggcttcattgactacagattgtgcttcagagtggagtgggaagtaaaatgagatttaagaatgctgtggggctttaatcccagcactcgggaggcagaggcaggcggatctctgtgagttnnnnnnnnnnnnnnnnnnnnnnnnnnnnnnnnnnnnnnnnnnnnnnnngggaaaaaaaaaaaaaaaaaaaaaaaaaaaagaaagaatgctgtggggcttcactaaatcccacaggtgatagttaatgttaatgacttcttcctctagacaacaatatctttattcatctttgtagccatagtgcctggagacagccagagatttagacaataaacgacagataagcaaatgaggtgaaaacttttgagaaagaaattattcctctcgatcaatattattcctcccttattttattttatttgagagagcatctcactatgaatcccttgctgtactgaaaattgctatgtagcccaggctggcctcaaactcatagagatccacctgtctctgcctcctgagtgctgggattcagggtgtgcaccaccatacccagctaattcctcacttgtatatataattttatagtcacagaaatacttttctttcagtatctcatttaacattttattgatatacccaacaagtttgtgaggactgaaggacaggtcttatcctcatttcctgaagtcactgtcaggttctcatagccagtgtcaaggatcaaaactccgtttcctttagtctcttcttgcatggctggcacgctgttgtgcatctctgtgccgaagccaggcctccctggagtagcttcactctcctctcccctcgctgtactcaggatttctacatgtcccccaaatagatgaaatttatggatgggggccattttacctcacgggaaacctgggaagagggtcctcacatcccatggtgtggcacaaattcttagcaaatgtctaaacacttttggattttgttttgttttgttttgacaaggtctcactttgtaacctgggctagcctggaacttgatatgtagacctggctggactcacacttgaactcacaaagattcacctgcctctgcctcccgagtgctgggattaaaggcgtgcgccaccaacgcccggccctgtcactgctttgcaaccttttcccagaaatacaaagccctttctttatttcctcatctctcatgtttcaatatgtatgttcctctctgaaaaacaaaagttctacattttttttgtttcttaatttcctaaaatctgcctcttagtgtcttattttatgcacttgcaagtgagtcagtttgaggatttcacacagcctgtagcactccacagaccaggcagtggggcttgggaagaaaaaaattaaaagttaatctaatgtcattttctgacagagcaattcagtaatgcagctggctgcttcacatgattaaatgtaggcaaacacttcaagttctgacctctggaaatgcatccccacatattcatagagacaatcatctggcttacaaatctgctgcagacttaacatctttcagcccttcaagggctcttcactggctgtggcatttcagtaacctccaaaattcatcgctttattattagaaactatttacggaagccaagtaggtgatacacacctttaatcccagcactcacgaagaaggcaaaggcttgaagatttctgtgagttcaaggccagcttggtttacatagcaacttccataccagcagggctatacaataagaccctgtctcaaaaaaaggaaaaaaaaggaaatatccttttcatttcaagcatgtgataatttacttggtatcttttgattctgaaggaaaaaaagataagtgtgtctttttcaaaggcatatttttctctattaatcatcaatattttttttttgagacagggtttctctgtgtaagctttggagccctggaacttactctgtagaacaggctggccttgaactcacagagatcagcctgtccctgcctcctgagtgctgggattaaatgggtataccaccacccagctgttcttttaaagaacaaaaatgaaaaatcaaggagggaattaaaaaatccctagagtcaaacgaaaatgaaagaaccgcttagcagaacctttgggtgcagctaaggtggctctaagaggagcatccaaagctgagagttactgctcgcatcaaaccactgaagagctctcaagggaattatgtgatgatcctaaaggtctcggaaaaatgagaacaagtcaaaaccaagagcagtagatggcaagcaataataaagattatggggaaattattaaataaaagaacaatcatagaattaatcaagtaaagaaaaatgaaatcaggacatttgcagggaaatgcaaatcattatgttaagtgaaacaaatcagattcaaaaatacaaacgcttcctggttctcccatatgcagaacctagatttgtgtgtacgagcatcagtgtgtgcgtgtgtgtgtgtgtgtgtgtgtgtgtgtgtgtgtgtgtgtgtagaactaaaaaggggacaatgagcgaatggggaggctgaagaaatggctcagtggttaagagcatgtgttctttctggcagacagcctgggttggttcccagcacacacaccttgtctgacaactgtctagaggacagttctaggggatcacagccctcttctggcctccactggctctgcacacacacactgtacacaatgtacattcaggcaaaacacccatgcacataaaataaagaaatcaatgtttctaaaagagggaggggaatgagaaggtaatgggatacatgtgtcttggaagcagaagggaaggacaactaggaggaggaaggagagcagcaagagggacaagggaggcactggggaaggggagagcatcagaaccaagtataatgacacagagtatggaaaatgtcatagtcaggcccatcgctttgtgtgccaactttaaaagtttttttttttttttttttttttttttttttttttttttttgggcccattatgtcaagtgaaagaagccaagtccccaagttccacattgcatcattccatgacatgctggggaaagtagaagctgggaaggccagggtgtggccaaggcagagggaagcttgggctcaaatgctaggggatgttttggagagtgatttttttctacatttttactgtggtggccacatggtcctaacacttttgtcagtattgcactgtaatccccaaacagagacttccacgtaatataaattaacaagctgtcccctcgaatcataagaaagcaacctctcccgggtgctgcgggtggagaattattttttagtataattttaggactgccttcatcactgttagctagttctgtcctcgcctcccacaggacctgaaatctcatccgttggcatttttccgtctgctctggttaccccttctctctggggacggtccagctcttgctccattgggaatgatgggaaaactcaggaagtcaggctaactggtaatcgcagggtggtggtgcgcagacctctgaggggccaagacccagcacaggggacgtgtgatgggaagaaagggaaaggcagacctacagagtaaagcacaggccaggaaaggccacgggaggctgtcacagaagtgggcaatgttcaacagggagggactgcgacaaaaacacactggagtgacctcacagcttggctcctggctggctctgggtgtaggccactctccttccgagcttcattttccgatcttgctcatctgtccagtcctgctcatagccctctagctcacatcctctccgaactgacgctgctgacaccgtctccttctcacgcagctcggcatccactttatagctgcgtaactcgtctgatccaagggaaggagaattatccttcctttccagaggagtgaagaggcccaggaagcttaaatgatttgtctaaagtcaccctttgaaaactgtggcccagacaccttccattgcttatgctatgctgccccctactggaatgatcgcagatacaccaaactacaaacaacacacttctacagtgggcttctatttattcgcgtaccaagcattcattgattaacctactatgtgctagaaacaattcagaagtgggctgcgcccatggaaaatatggacccagtcatttgactgaccagttacagttagatgagctctgtgaaatacaaagtatagggcatagaatagggtgtgtagccttacagtaaagaaattcagggaatcgtggatgaagtagaatccataggaatacattattggctggcaactgggagaggggactaaggagttatcaagggtgcttcacagggctcagggatgaacagggaaggtgggatactgccactaagttgagagtacttaaaaggagatgagacagctgggtggtggtggcggcggcggcggcggcggcgcacgcctttaatcccagcccttgggaggcagaggcaggcagatctctgtgagttcaaggccagcctggtctgcagagctagttccagggcagccagggccacacaagaaaccctgtcttgttgggggagggaggaaaggagatgatacttacaaagaacagtagtttggttttgtggcagtttggaaataccaatgaggaaaggaaagcatagcagtgaatgagaatctgggctgagtgatcactgctgtgaactgaggtctacactcaaaccagtgggaacaaaacttgggtgctgttgggtgtgcagagagaatgcagatagtatttgaaactgtggcagtggatgaacgcacagaataggaagggggcttctttttatttcttttttttattagtccaaattaggaacaagcttgcttcacatgtcaatcccttctccctcttcctcccctcccccaaccctcctccaaccccccacctgcctcccccccagcctcatccaccgtccactccccaggcagggtagggcccttgacggtggctccccaaagtccaccacatgatcctggaccaggcctaggccctcccccatgtgtccaggccaagagtgcatcccttcacgtgggatgggctcttaaagttccttcttacaccagggaaaaatactaatccactaccaggggccccctggagtgtggaggccacctaattgacatccatgttcaggggtctggatcagtcctgtgctatcctcccagacagcagtctggggtccatgtgctctcccttgttcaggccagctgtttctgtgggtttcaccagcctggtaccgacccctttaatcttcatttctcccactctgcatctaggttccagagttcagttcagtgtgtatctgtgggtgtctgcctctgcttccatcagccactggatgagggctctaggatggcataaaaagtagtcatcagtctcattataggggaagggcatttaggttatcctctccatcattgcctggattgtcagttcctgtcatccttgtaaacaatctggaaatcttggaagggggcttctaaagcaggccaagaaacctctgcatttacattgaagagacagaaccagtggtggagagccaagggaggtcccagagggataaggtggagcatgggtcaacagcttaataaaacagttggggctggcaggatggctcaccagctgaaggtgcttgctgcaaaacctgaggacctgaggttcaaccacgtggttgaaggagagaactgacttccacgggtgtcctctgatctccaactcatgccatggtatgttcccatgcatgattaaataattagatgttttgaagtgtagaagagccaacttgggtgaagaagttcgagggcagcaagtcacaatggagttctttcttcacaggcatatagtacgccctgtggagaaagatgatgcttttgaagtggcacttaagggtctggccagcatcatgagcttgtgggccctgcgctcgcctgggccccctgctgtttaaatggtctgtttcgatcatcttgaaattcttagcatttgaactcattttgcagccaacaatgaccacccttttgaccttcctgcctccccctcccagatgctgggactacatcacaggggtatgctttgttttgctttgcttttttagtttttagctttttcaagacagggtttctctgtgtaaccgccatggctgtcctgaaacttgcattgtttgctttgtagaccaggctgccctcaaactcacggagatccacctgcctctgcctctgcctctcaagtgctgggattaaaggtgtgtgctgccttggtcaggggtatgttttaacaagtggctctgagttctccttttgcattggggctaataaatcatgaagtaggccctgaaaagaggcaaatgcaaggcagagacccaggcatgatggcacttgtctgtaatggagaattgcaagtttgagattctgtctcaaaaacaaaacatgttctatttgtatttttttcattaattgagaatatatgtctaagtgagctagccaatgactagcctgggataattgagaccctatttcaaaaagaaggaagggagggaggaaggaattcatgaactaaacacacaacggttggcagtggagctggagagacggctcagtggttaagagcactggcagcttttccagacgactagacttcgagtcccagtacctacctggtggctcacagccatctttcaccctacttccagaggatttgatgccttcttttggccccctcagggactgcacacgtgtggtgcatattcataaaatggaggcacataaaataaaaacaaatcgaggttgacagtgaaagttctccctgccaccctgtcctctggctgtatgggtccctgactgaagccattgcagtcacctttccatccaggagcacctttcgatgttttctgtactgacaggcacagagactactgtgtcttcccaatggtgcacactgaggtgtgctacacctaggattctgcacttgacttttcttccactcagtattacacttcaggagccataagtagcagttgtggctatactgcctgcacccaggaggccgaggcaggaggacaaaacattctagtccaccctgagcagctgttagagtttgctttctattcctgtgacagaataccatgacttaaagcaacttgggaagaaggaaagagtttatttggcttacaattctgattaccatcaatcatgaaggggaggtcagggcaggaactcaaggcaggaacctggaggcaggaactgataaggaggtcacggagaggtgctgctgactggctcgcccctcacggcttgctcagtcttgctttactgtaccacccaggcccaccagcccagaggtggtactgcccccagccctcccacttcagtcatgaaaatgccctacaggccaatctgatggagatgttttctctcacccaggagttagccaggtcctgtcttgcttagcttctaagatcacacaaccgttcaaggtggtacgattgtagactggagatgtttcctcaacttaggtttctatttcccagagaacttcagcttgtgtccagttgacaaaaactgaccaataggctgcatagtaagaccttgcttaaaaaatactaatgctacattaaaaaaataatttcctaattaacaaagaactttctcaaaaaaaaaccaaaacaaaacaaaaagcaacaaaacaaaacaaaaaaacgggcgcacagtgcccactgcatgtgccctgccttgtttgtggttttcaggggaaaacatcagcaggaattacctccaaaccagttggggctagatctgcaaacagaggtggcaggctgaagtggggcgagggggctcttctagacccccccatgcctttgtcctccatggtttgtcaattaaaatttcagtcattcattgctcaaaacttttagacacatggtcatgattgacgatgtgtattacatggcaatttgtttttaagatattatgtttgtacatcctcatctcaaaggccacctccttttggcacgtttctttgaaactcctagatttcctcagccagaataacgtcagcggccccggatgttctggagggcgatgtcctgagttgtgattatttgtcctgtcttaagggtgcttgttctcagccctttcatctgaagatggtcccactcgccctgcttccttccaatgagcaccagtgtacctgccttaggggtcacagcctgtgccccatcaagctagatttggctacctgtcctcaataagccaatttaaaaagccaaattaatagtggaaagcagaaaaaagtagcactggaacagtgttcaacacagttaccttgggaagactcgagtggctgcaagggctctatgcccctcttcacagtgaccacattcagtctctctctctctctctctctctctctctctctctctctctctctcctcttccccctccctctccagaactagactagcgtccgactaacctctgtttccttccagattcctagtaagaacttctcttttgtggctgcagagacggctcagcagttaggagcactggctgctctggcagaggatccgggttcagttcccagcacccacatcaggtggctcacaaccatctgcaactccagttccagagacactaatgacctcctctggcctccatgggcattgggaatgtacatggtgcatatacatacatgtgggcaaaacactcatacatataaaataaaatcaataaaccttttacaataaaatacctcaattatttctcttgccacttcccttccttccaccctcctccctcgtccgtctctgttttctcattttggctgcaccttcttaatatctttagctggctcctctctgttttcttaatttttaataacagttgttttagaactcattcactagaaactttcccctctctgaatgtgcttattccctaaaacatttcttctagccccttggcttcaaatatttttattttggacgctccaagtccacactccactcgacttctccctgaactgatacctgtgtagaaggctgttgccacatccattcgataatgtaatagctgtctccctctccacacaccccagacagggctcttgatatttccattcaagctgttcaagaaatcttctttgtatcaaataatggcagctgcattccagttgcttgggtcagttctctgtaatgtgactcttctttcctacttcctatccaaagctttgtcaactccactttcaaaatccttaaagaacccggctacatctcactgtgtccacaaggatcctgatccaagaccttgacatcttgtgcctgccctacagcgatagccagctccctgccttcctgcttctggcttcccagctattctctgcccagtaaaaccagtggttctgttgagacctaagcagtaagttgtctcttcagttctcagaaactcccaggagagcagtcctaggagccccacccttccacccccctacctctggcctctacattgtcccttaaacttgcctggcagtttctcaccttagaacatttacacttactgtcccctcttccagaatcatttctccatgtctcatcctttgttctttcagaactacacacacacacacacacacacacacacacacacacacacgcatgcacgtgcatatgcgcacacaaaaccttcattgtttcttacaaaagtccctctagacaccctaccacaattccacaaaaggcacggcacacacccctctaatttcaggtcctaaccccctgtttttctcaacaattactgctatatacttactttaatgatttttttgttgttgtttgtcacccatattctaagttctatgaaaactgaaggttttttgtttgttttttatttttattacatctttagggggagcttgcatgtgtcacaatatgtgtgtaaaaatcagaggacaatttataggactcagttctctcctttcatcatgtaggtcccaggaattgaactcgggctcctcaggcttggcagcagggacttgtgcccactgagcctagttgcccccagagttttatctgatttgtttactgctgtaaagcaagagcattcaatgcaaagttggcatttaaaaattacttagtgaactaagaaaatatttttcaacttatgtcttctatttagaactctttggtgattcccaaagcagagttcttaaaccctttggtctcaagaaccctttatactatcaaaaagcattaaggacactaannnnnnnnnnggaattaaaagtgagaaatttaaaaatgaacatatcgatccatttaggatgataatatggggctctggactagctcagcagtacagaacttacctagcctgtgaggccctggacctagtctccagcaccacaaaaatcagcaaataaataggcaatcaaataccacaagtctgtaaatacaaataaactctataataatttcctaaataaaacatagtgagaggactggcattatttacatttttaaaaaatctgttgaaaaatttggcttagtaggaattaactgtattaccatgcctactgctgaattgaacctatgacaataagcctggaagcttctagaaaagtacacagcactttcatgagagagtgagaatctgaacattcacatacaactgcgcctttgcgccaccacttccctccactccacatggcaagttcctgctggtcactcacggcctgactcacctcctgccacctctagacaattcatttcttccttctcctcccataatacattgttctcttctctctcaagaatatattgtgttagcctcttgttacctagattagtgtctgtttccacagttaactttcttcctccagacagctagctacatacccaaataatctttatttttcccagcccctcttgcagtgtctgggagtcaaacactgtgtaataaatgcgtgttgaatggagagatgacacaggagagagggagaagggcggtctctccttcctgtagtaacagaaaacagtatttctgcataagattacagatttcagagtggcaaatatgatgtgatcaagtatgttacagacaggtgaacacatagaaaaatctcataataaaatcatattttgtacaacaattacatactaagttgttttttctaaaggttaagttaggcatcggggcacacacttttaatctcagcacttgggaggcagaggcaagcagatctctgtgagttcaagaccagcctgttctatctacatagtgagttccagtttcaggtcagccagaaatacatagagagaccagttcttaaaaaaaaaaaaattatcagtccaggaatatggctgagttagtaggacgcttgcctaaggagcacaaagccctgggttccatgctggcactatttaaccctgatctggtggtgcacacctgtaatcctagtactccaacaaatgaagggcatcttaactgcgcactgaaattgaggccagtctgggctgcatgtgaccctggctcaaagaaaaaattaacaatttcaaagttttcctaacacttatttagtgggcacattgttcacattgttcacaaagtgaatctgaaccattatgtggtttttcatatttaaagaataggtggcaggtggcgtgggggacagggaggattgtgacacacatgggacaccagtctcatgttacaaaggaggaacacaaggctcaggagatgaagtgacttgccttaaggcacactgaaatcagcaacctggccttgaatccaggtgtcagacttgaaatgaaatacgttttctagttatcccatacccatcttggttgtgagaggctgagaagtcaagcagtccaatgaatacaatgaagttttctaagacacctctggcttctgtacagacttctaccttgctcttgcttctaagaccatcttaggaactcatgatatatatccatttgctctttttccccctaatttaagacttgttctattttaaataatttatttattcctatgtgtatgtgcacaagactacaggtaacctcggaagccagaggctcccctcaccccaccccacccccaagctgaaattataggcagttgtgagccacccaacgtgaatgctggaaaccaaaccctggtcccctgtaggaacagcacaggtgcttttagccactgagtcaattctccagcctgtgtccctgtattctgtttgtttgtttgtttgtttttcgagacagggtttctctgtgtggctttggagcctatcctggcactcgctctggagactaggctggcctcgaactcacagcgatctgcctgcctctgccgcatgcgccacggacgcccggcatccctgtattcttattggcctctcgtccatgtaccactcactgccatccacgtctcccacccgtccatcatggtagagcattctgcttgggatcatcagtagcagctgatgggcggttgaccttaaacaaaggaagtcacaccctttccttccctgggtgttttattttctcctgcaacacagcccgctcaaaccttcccaatatgagcaattcattatcttccttcagtgtttctgcaatgctttggtttcatctgtgccataacttacataaccttgcttttttctctatctcctccctagattgtaagttgctcggtgctatttgccagtcttcaacctccttgcactcctgaaactgacaactcctcctctcttggaaaccttcctccctctcccatcttggagatcctgatgtttagctctttgggagggcatgggtgtacatgggtgtacgtgtgtggggaggctgcacttgctcatacaggcaccttggctgtcagaggttggcatcaagatatctccctcaatcacatctgtattttatttatttacttattttgagacaggtccctcaccattttagcgagacttgctggccaatgggaccctgctctctaccttttcctacacccccacggtcccggtgctgaggttacagacacacactgactttatataggggtgcgacggatccagactcaggtctcatgcttgtatggcaaaacgctttgtccaccaagccttctccctagccccagccctatttgtttcagtctttttatcgctctggactcttcagtgggatcttctttgggatggatcctgatagggccttgggcctttgctcttttctgctccccttttcagcttcgnnnnnnnnnnnnnnnnnnnnnnnnnnnnnnnnnnnnnnnnnnnnnnnnnnnnnnnnnnnnnnnnnnnnnnnnnnnnnnnnnnnnnnnnnnnnnnnnnnnnnnnnnnnnnnnnnnnnnnnnnnnnnnnnnnnnnnnnnnnnnnnnnnnnnnnnnnnnnnnnnnnnnnnnnnnnnnnnnnnnnnnnnnnnnnnnnnnnnnnnnnnnnnnnnnnnnnnnnnnnnnnnnnnnnnnnnnnnnnnnnnnnnnnnnnnnnnnnnnnnnnnnnnnnnnnnnnnnnnnnnnnnnnnnnnnnnnnnnnnnnnnnnnnnnnnnnnnnnnnnnnnnnnnnnnnnnnnnnnnnnnnnnnnnnnnnnnnnnnnnnnnnnnnnnnnnnnnnnnnnnnnnnnnnnnnnnnnnnnnnnnnnnnnnnnnnnnnnnnnnnnnnnnnnnnnnnnnnnnnnnnnnnnnnnnnnnnnnnnnnnnnnnnnnnnnnnnnnnnnnnnnnnnnnnnnnnnnnnnnnnnnnnnnnnnnnnnnnnnnnnnnnnnnnnnnnnnnnnnnnnnnnnnnnnnnnnnnnnnnnnnnnnnnnnnnnnnnnnnnnnnnnnnnnnnnnnnnnnnnnnnnnnnnnnnnnnnnnnnnnnnnnnnnnnnnnnnnnnnnnnnnnnnnnnnnnnnnnnnnnnnnnnnnnnnnnnnnnnnnnnnnnnnnnnnnnnnnnnnnnnnnnnnnnnnnnnnnnnnnnnnnnnnnnnnnnnnnnnnnnnnnnnnnnnnnnnnnnnnnnnnnnnnnnnnnnnnnnnnnnnnnnnnnnnnnnnnnnnnnnnnnnnnnnnnnnnnnnnnnnnnnnnnnnnnnnnnnnnnnnnnnnnnnnnnnnnnnnnnnnnnnnnnnnnnnnnnnnnnnnnnnnnnnnnnnnnnnnnnnnnnnnnnnnnnnnnnnnnnnnnnnnnnnnnnnnnnnnnnnnnnnnnnnnnnnnnnnnnnnnnnnnnnnnnnnnnnnnnnnnnnnnnnnnnnnnnnnnnnnnnnnnnnnnnnnnnnnnnnnnnnnnnnnnnnnnnnnnnnnnnnnnnnnnnnnnnnnnnnnnnnnnnnnnnnnnnnnnnnnnnnnnnnnnnnnnnnnnnnnnnnnnnnnnnnnnnnnnnnnnnnnnnnnnnnnnnnnnnnnnnnnnnnnnnnnnnnnnnnnnnnnnnnnnnnnnnnnnnnnnnnnnnnnnnnnnnnnnnnnnnnnnnnnnnnnnnnnnnnnnnnnnnnnnnnnnnnnnnnnnnnnnnnnnnnnnnnnnnnnnnnnnnnnnnnnnnnnnnnnnnnnnnnnnnnnnnnnnnnnnnnnnnnnnnnnnnnnnnnnnnnnnnnnnnnnnnnnnnnnnnnnnnnnnnnnnnnnnnnnnnnnnnnnnnnnnnnnnnnnnnnnnnnnnnnnnnnnnnnnnnnnnnnnnnnnnnnnnnnnnnnnnnnnnnnnnnnnnnnnnnnnnnnnnnnnnnnnnnnnnnnnnnnnnnnnnnnnnnnnnnnnnnnnnnnnnnnnnctcatcctcctcctcctcctcctcctcctcttcctcctcctccttgggtgcccttcgccatgccctacccctgccatcctagcaaacaaaatgtgttttgaggacagattgctccagcagcactctatgaatcatgtatgtttggcaaacgtattcagagcctcctctttatcttaaattggtttacaataacaacctgtttcacagggcttgtctatgaggactgggggagatatagttaagtgaggtgcttagcccggtgcctggtatgtagtaggcattcattaaacagtaactgttgttgtgctctgagtgtccttttatggggactattgaagtcctctccagatcttcttgtcattctttaccttgggaggggactaacatgaaacacttattataaatgccaaggagcaacagcagttaagtcatcattttataagtgagatgagccagtgcttggacataggtcagactctcaacactgctgctccataccgccaaaccaccaaaccaccataacttcccactatgctgctcaagaaaacccctagccaccatcttcatatgggaagagcccagactgacagtcccaaaactcatgccttcaccatttctcttacttcccagcagttctctgtagaaaccttccagggacccaggtactctacagaaaccaccccaaccccattctgtacaccccccactcctcccttgtctaattcctgcctttccttcagggccttgctcaaattccacctcctctcacacacctttctcgggcctccttgagcccggacctctggaatcttttctgatatttggtaggtagtatcctgtttttctcagcccttacattttcttactaggtgcaaccctctacagtgtacacatcggttcatgggcccccttttttgctttcgtagccccagtagcccagggcgctgtgtgtagaaggtgttccatcaatgtgggacaattgggggtaaaggagcgagcttcccagggctgtcccccaaccccttttaagcactgcccaggtctgttcttcttgcttcttagcaacccccccccaggcaagaccctgagaccccccttctctgatgccaagcacttctttagctcattctcttccaacccaaattgtctccctagccccctcttctccagtgtcacccaccccacccccagcctctctcctccagtgctagcctaaggctgcagaccccaggcccaacagggccaccccggggccagcattatttatctggcctcttctgcctcccccggggttgccctctttgcacccggcgcnnnnnnnnnnnnnnnnnnnnnnnnnnnnnnnnnnnnnnnnnnnnnnnnnnnnnnnnnnnnnnnnnnnnnnnnnnnnnnnnnnnnnnnnnnnnnnnnnnnnnnnnnnnnnnnnnnnnnnnnnnnnnnnnnnnnnnnnnnnnnnnnnnnnnnnnnnnnnnnnnnnnnnnnnnnnnnnnnnnnnnnnnnnnnnnnnnnnnnnnnnnnnnnnnnnnnnnnnnnnnnnnnnnnnnnnnnnnnnnnnnnnnnnnnnnnnnnnnnnnnnnnnnnnnnnnnnnnnnnnnnnnnnnnnnnnnnnnnnnnnnnnnnnnnnnnnnnnnnnnnnnnnnnnnnnnnnnnnnnnnnnnnnnnnnnnnnnnnnnnnnnnnnnnnnnnnnnnnnnnnnnnnnnnnnnnnnnnnnnnnnnnnnnnnnnnnnnnnnnnnnnnnnnnnnnnnnnnnnnnnnnnnnnnnnnnnnnnnnnnnnnnnnnnnnnnnnnnnnnnnnnnnnnnnnnnnnnnnnnnnnnnnnnnnnnnnnnnnnnnnnnnnnnnnnnnnnnnnnnnngcggagggtcgggatggccgcggtggcggcgggtagtgtggcctgcaaggctgtgtgtgagggaaaccgtacgacgcctcggagtaaatagtaagcgcagccagtgtgttgtgggctggagaagaagccgaggatgttggagctggaaaagggggagggaggagggcgagcaccgaccggatcgctgtcttggtggctgaagggccgtcgggatagactcgatagatcggcatggtctcaccgggcagaaccgaggccagccgacagtggggggtggggggtagcaagaaggcgcatttcggcccaatgcaggaagtttgtaacaattggaggtgctcagccagcccaggaggcggtgagctgctcatcactggcatgggaaatcggagctccaagaggggattggatggatgcatgcataacgcctgtatggatacaagcataataatagtcgtgccctatgggccaggcttggcgctacatttgataggaattagctcatttaatcccagtatgtgtttcgtgagctagctggagcacctgtccccattttacagatgaggaaagagaccctgagagcttaagtaatttgtccaaggtcacagagctagtgagttgactctagtctcttcatgtttaaaccaggacattatatcacacggtgtcggagtcagttggactaatttctctgctctctcccaacctagaagcccgaaattctaataaataatgttgagatggtgttaatgttgctggaggaaattagtgattgcttgaattatcctgagaggagtatgtttgttaagcatgcattctgttcagaagaatttgccagaacagtagttttttaactgggcaagagactcaagggatcataaattctctgaaattttttgctaatttgaatttacatgtgaaaatgtatggctttcaaggagaaaaatccctagatttttttccagactctccaaagaagatatgttgaaaaaaaattagaatgtgtgaaagaatcctttgtcccagccaatagttggcctcctaagggtttatcattgttacctgactttctgtgaaaactttctctagtttgtttgtgggtttagctctatcacacatcaaagtgatgtgattcatgggttttcaccgtagcagaagtagggttcttccagactgcctgaatgtgtgcagggtgagtgggaagggccctaccctggagatcaaggtgtgtgggctctcagctgaccttggcccctggaggcttgtgactttaattcatctttttccatggctctcatcatctgagagatgaagctgaatgagatcaagttggagaccttttatgctggtctctctcgaattaagagacgacagtttgcttagatatgtcagggtttgaagagaaggttacgcttgctcagtgcttattcttaccagccttacaggcgtcaattattccgctctcaacgcccttctccattttaaacttaagctctcccatcatgacgggccacctcccatcacatgtttcctaggttatttttgttgttctctgtggatatctggaggagttcattttcaacctgaccactgtctccagatgtggtgtccttttaaaaagaaaggataatttctcctttggcttgccggtcctgtcccattacatccttttgttagatgtcctgatctacgcctatcagaccacagcctttgggaaatacccacaagagcaccctgctccctttcatgagctaaaactaattgcctggagcacaacaccttgctgtggattgtttttatgggactgactggcatggatctctccacactgatgtccccacctgtccccacctcccaccacttccacccttggcacggcatttccctgtctggaagggtttaacgtgtgctgcagtcctggaattttctttgctctactttttctggatcacttataaaaaattaagtcagacaggtaccagtgtggtctcttggggccccttgtgctccttatccccttccattcagaggagtgactggctgtttccatctggtctttcctatccctaagttcattctcaggccttaatgaagacatggcccctccagcccatttaaaatatctgccaaaactttgagaaattattgagataatttgcacctaattactccgtcactgaatattagtgggtgacacgactgaaactttatagaaatatcattgcttttcagcccacagataacattgctcactcctctgtctgtcttaaggccgctggagtcccaccactccctgcctcccgattagtaagccacctttcccactgttcatagataatgcatcctgactccagataagctcacccctcatttatcctaagacaggctgcctgggttccctggacatggtcacgtgttatacctccacccatttcatcagatctttccttaaggttctggctcacacctgcctttctaggaaaccccttccttcccccagaatcatttattcctctcaggggaacatttagtggcatgcccagtcagtgtgtcatctaattttttaaaaacacttgcacattgtttgggaaggaaaaggttgtggatcttggtcaagtttcttcccaagcaaaacttaacacaatccccaatcttaaatacttaccattaagcattgtatccttatgtccaagggttacactcacctgaaataggcacccatagacacataggtttcaaggtcccttctaaaaacctttttcagggaataaagagatgggttgctgtgcaagcatgagacccgagttcaatccccagcacccatgtaaaaagcctgagggagaacttatttgttgtcccaattctggagaggaggaaacagggtccctggggttcaatagccatccagcttattctaattggtgagcctcaggttccagtgagagaccctgtctcaaaggaaaaaaaaaagcaaacaaaaagaaaacaaagacaagatggatggctcatgaggaacaacacgagattcatctatggcttccacatgcacacctaacacacacacacacagaggtaccacacacacgctcacgtggacatctaacacaccacacacacacacacacacacacacacacacacacacacacacacacacacatgcatacacacaaataaagaacttcttagaggatgcattgcttgggcttccttccctggaactgcagtctactcccctgttgtaagcagtaccatcacaattcacctttgacatctgtcttacctccataggtgggatgtcatccaataatggtgacctacagggaagaaggactgagaacggtggtcatcactgtagcgatcaccaagtaaacacactgaagctcttaacggttatttcttcaattgtcttaaatcaggtgtccaaggacacaaaccttgattgccaatgattcagaccagagctggtccccggcctcctggcttctaaattgaaagtgtttttctttactgcctttggcttttgatttcatatctctggtctttcattaccaagccctccccaaaaagaattgattcagtctgtttttgcttttgctttctcaagtgcttcttttgtacttgtatgtggggtgaggaggggcactaccaaagctctaattgactccttgcctttggtttatttaaagcacccctttctcttggtgctagcaggggagaatccccatctttggttttgtccttccaagtataatttggttttgaggaaaatcagagtagatagaaatgagataagccagtgagcccaggccgcatgactctgagattcaggctataatggagtcctgcccatgagactggttttgagtggcggtgctctgagcagatggagagcactctctggtttgcacctgcagtccaggaagtgaagaaccctggatgagtcggaggctgagatagccctattaggaagcactgacaaattcccaagtccctgatggatgctttcagtactgttgtagtctcccgtacatcccactcttgtctggggaaaacaggccattaaaagttctctttgagacacaagttaaactcgtcctgcatcttcttatgttactgtgggttttcctggtgtcctaccaccctccgggtgtgtaaggagcttcgaactttccagaccttgtcacttatgtgtggtcctagcaacagcctcatgaaggaaccaaggaaactgtgctcacttcatggatgagtaaacagcggctcagagagatgacagggcttcctgtcagctcctccagggacccacccacagctaataaacaataaggtggagaccagagctggattctctgtccttgtgctcagcgatttccccctgcacaaaactgtcctgatgtggattactggggccgccattttccactttcaagtatggcccacgccagtctttgaaaggtgatagtttgaaaatcagtaaattatactgctggaagtgaaccctaattgtatcaagagagttgtgttaggaattgcttagccttgcggataatatggaattgtgtggacttccaatgaggaggaagccattatcccctcagtgcccacccagcactgtctgacacctactgtgagaaatgcttttactcctcttgtctgtgtcccctaaccatattctttggacagtgcttggtacccaagtattcagcagttctcttgaagaatacactggactcaaatatatatatatatatatatatatatatatatatatatatatnnnnnnnnnnnnnnnnnnnnnnnnnnnnnnnnnnnnnnnnnnnnnnnnnnnnnnnnnnnnnnnnnnnnnnnnnnnnnnnnnnnnnnnnnnnnnnnngggccttactgtggagcccaaactggccttgaactttcagtgatcagcccacctcagcctccccagtgctgggattacactcagctttgtccaagaggcaaaaacatcaggggtaggcaagtcctaaggagggagggcctgagatgcctcagctgagcttggggcagtcagaggatgcttcagggggaaatggcaactgagacaaatctcagacagaggggaagagtggagaatggtgggtcagcaatccaggcagggaaaacagggaaccatggcttcccctgagttcctggcatgtttaggaaacactggataattggatatatctggggcatcgagttactcgcttgtttccagtaagagtgtggaagaagagtctggaaagggaagctgtgagcagtctgtaagattggctttggcccagaggctaaggggcctcgttaaaggcatatgagtggagaagtggcctgtttggaggttgtgaggaggctgaggagccaggattcactcccccctgcactgccctgagtgctgattgtagctccaggtgtttcagacttaacaggacttaggcctggctgcctgtggtagcaaatggtatatggataaagctatgaactctggccctgcccccacccttactgaaaggttttgcttttttcatttgtttattttgcaatgctagagcttgaacccaaggcctcatgcttggtgtgtattatcgatgctccctgagctacacctcagccctgcagagaggtttcagcgacaatcatttggattttctgcactccaggattcatttcactcaagttctgataagtttttttttaatctcaaacattccatttcttttttttaacagttccaaagattttatttattttatttgaattacaaacaagattgaattacatgacaatcacagttcccttccccctcccttcctcccctaccaccccctgcaactaaaactctaccaatcacatacctttcttctaatcttcacctgactcaacctttctgctccctcatgacctctgcatccttccttttcttcccttctcattctcgtagctctctcccccctcttcccatgttctcaatttgctcaggggatggtgaccctttccccctctccaggggtcaaagtttgtctcctttagggtcctccttttttactagcttctctggcagtgtggattgtaggctggtaatcccttactctatgtctaaaatccacatatgagtgagtacatatcatgtttgcctttttgtgattgggttacctcgctcagaatggtttcttccattttcctgcaaatttcaagattccattgttttttctgctgagtagtactccattgtataaatttaccacattttctctatccattccttggttgaggggcatctaggctgcttccaggttctggctattacaaatagtgctgctatgaacatcgttgaacagatttccttgttgtatgaatgtgcttcttttgggtatatgcctaagagtggaactgctggatcttgtggtagactgattcccattttcttgaggagtcaccatactgatttccaaagtggctgtacaagtttgcactcccaccagcagtggagaagtgttcccctttctccacatcctctccagcataaactgtcattggtgttctgataaattttataacacaaatttgttttacaaatcaactttgatctatgctttaataatatgtacgacattagcaaagtcacatgtgtagtaaatatgtgtatgtggggggcggcttggatatctgtgtacccaaaggatattgatagataacattttatgaaaggttatgtatgtaggtctaaaaaagttattcaacatttactggcaatgaatactttacaaattcaatcctgcaccacaaacatttaggtgtccccaaagtaagagtgttctttcacctttttctctccccacctgcctcataacagtagccaaccccagtccggtgctgagcacatcttcccggcatttacttctcgacacagctatcttaaactaaactgctcatttaactttaaaatctccccacctgagcagctccgtgccccctcctaatcctctatgaagaagtcagaaggatgattacaaaagcaaatctagccggacattggtggagcatgactttattctcagcactcaggaggcagaggcaggcagatctctgtgaatttaaggccagcctggtcaataagagctagttctaggacaggctccaaagcaatacagagaaaccctgtctcaaaaaaaacaaagaaagaaagaaagagagagagagaaaggaaagggaaaggaaaggaatggaaaaggaaaaggaaaaggaaaggaaaggaaaggaaaggaacggaaaggaaaggaaaggaaaggaaaggaaaggaaagaaaaaatctatatggctgtagctgtgtggagcggcacacatctttaagccaccaccacccccattcgggaggcagaggcaggcagatctctctgcatagcaagttccaggccaacaagggttacatatcgagaccatttctcaaaaacaagcaaacaaaaatctatgagatctgtgtataaaccaatacaggggttggggattgtgtcatagctggtggagtgtttgtgtggtgtatatgaagccctgggtcctagccccagcactgcaaagactatatgtagtggtacatacctgtaattctagaatttgggaagcggaggcaggaagatcaagaagctctaggtcatcttcatatagtttgaggccagcctggactatagggaccctgccctcccaaagactggtgagatggttcagtgggtaaaggcctgtgctgtctgatgatgcacacttaatgacttgtgtttgatcctcagaacttgaacaaaggttaaaagacagaatgccacaaagttatcctgtaacctccacacctgggccatggcatgtgtgctcacacaacacacacacacacacacacacacacacacacacacacgcacgggtggggtgaggttagggaggagaaataacaaaattactaaatacaattttaatataaaaattaaaattaaaaagtaaaaccaatagagcacaaaatatagcttgtttcactctaccctgtaagcgaggcttcgaacacttgtcatccctgttagcctcgtccccataggctcgtagtgtggtgtgagcagatatagaaacagtaaacacttccttgcagagctggatgaggattacctgatcagtctgttctattattttatgtctttctgaatgcttaaaatctttagtaataacaaaatttttaatgcactccaatcacaccatttcgttcccaccctcctcttgctcaaattacttctaggacaatggctaacccactactactaaattgctactaatttttaaaaagatttatttatgtctattttctgtgtatggttgttttgcctgaatgggtggatgtctatataccacaggcatgcagtgccttcgatagccagaagatggcactatattccctgggactggaattacagacagttgtgagcagtcatgtggatgctgggaattgaatctgggttctctggaagagtaagcagtgctcttaaccactgagccatctctccagccccaactgctactggtttttattaggggaaaattccaaacccacacaaaaataggaagaatagtatgatgagccccttgtgcccagcgcctgcttctcgtggccactgaggccctacacggtggcgtgttcccactctcacgcttcctctttttccatgactctctttagtggttgctggactccaagcaccctggcatactttccacttttttattctacaaactccttccctttcagaaattgaacggaataatcttttcctgaaatgttcactttttttagctttcacgggtctcatcggagatgttatatatccttggggaggtcacccctgtttgcttttttttttttttttttttttttgagacagggtttctctgtggcttttagaggctgtcctggaactagctcttgtagaccaggctggtctcgaactcacagagatccacttgcctctgcctcccgagtgctgggcctaaaggcgtgcgccaccaccgcccggctggaggtcacccctgacatcgcagccagtgtctctgacaagcactttcacaacaccttgtcccagcctttcattccacttttatctcacaattctgtatctgtctcccaacgccaggctgggagcttccaagcaagagttcagtggggaccacaggcacgtaaagctgtatgagacagactctgagggaagtgatgatgccactgagagcacagaccaagtccactaaccctgggacaggttgcctcctcgatgcaaggcacgttttgaaggatatctaatagttcatcaggaaaaggccagaatacaagcaaatgtggtattctattgtgaggacgagacttaatctgcaggatgtgttcaggcaacgtggtagatgaatcagagctaaagggtaggtctttggggaaaggtaacaaaaaggggcttgaagtttgttaagatctgggttagactttgcgactggcaaggaggtaatagaagatggactccacactcaactcacctgaactcaaataatggagacttacaaagtagctggaggctacctagctcagccattcaattttcccactgaagaaacatcctcaaccactggtccttgtctcctctctccttgttccttaactcatcaggcagcagagagaaccaggagggcaatggaaagagtaaggaaggccaggccttgtccatcctcagagtgaatgagtgtggccacaccctggccttggtcagaggccttcccagaattagaaaacggacatcccagtgctgatccaaaaccccaaatgtgccacctccctaagcctggtgattgtctggcttgtggtggcctcttgggagtgggccaaggacattgtgtagagctcccgggaattcccaaattcccgttagtgcacttaccacccactcaaaagctgatggcagccaacaagcaacactgtaccattaaggtgtttgtcaagaagctcagctgggtgttgtgggcgattctgagggccctttttagactggctgcaacagaagaagaagaagaagaagaagaagaagaagaagaagaagaagaagaagaagaagaagaaggagaggaggagaggagaggagagaggagagagagagagagagagagagagagagagagagagagcttttggaagcaatgtagcactagagttggggtgtggcatgccaaaaagacccctccctgggaggcaggacactaccctccattctgccccccaacttgctttgcatttttaaataagtgatttctcctccctgcatttcatttttctctttagcaaaaacattcccgtgaaattacatgatcttctaagtttcctgagcagcgcatttcctggctttttgtattcagtaggacttttttcttttttccttttttttttttaaatttacagtaggacatttttaaaaagtagttctaacatgggggaccagcagcaagggccctcagttgcaaggctagaggagaaaggttttagtgggaaaggaattcaagggaacagacccagtgaccaaggtgatcctgggaagccaccagagagactgggacagcagaagtgccaagggtggtagctgctgtaccgcagagtgtgggcacaagaacacagtgacaacattgtcaaaatcaaaagctttatgttcatgaattagttttctactattgctacaacaaattgccaccaattcagttcaataaaataatctagctattggccaggtattgtggaacatgcttttaatcctagcacttgggaggcagagggcaggtggatctctgtaagtttgatggccacctggtctacagggaaagttgcaagacagccagagctatgtaatgagactttctctccatacctacagtaaaaattataaagctgatcattgagttccattcctagcaccacaaaagtaagtcaggaaatcaggaactccaaataggtgttatgggatcgaagtcaaggagtaggcatggttgcattcttctgcaggctccaggggagagagactgtgccttttggcttcctgggctgcttcatttcctggcttgggaccttctgctgctctcatcacacctctgaccctgactcttctgcctccctcctctaaggattcttgtgattccatggtgctgtccttggtgccccagggtaatcttcccattggaagatccttgatcccatcgggccagtctcttttgctatgtgacattcacaggctttgggaatttggatgtgaccatctttaaagaccattattacctaatgcttcatgtcactgaggcctcttaccaattcttttattgtcctctgttaccagatgaggaacacgatgcagagagacgtgaagtcatttgcctgaaggcactcagctaagttagcaatattcaatatgcggcaggtatgtaggtcccaagtgaaactaccttcagataggaccctatccagccacaggtgtaaagggaatttgtgtaagtctctggaggatgcctcctaatgtctacagcttcatgcatgcaagggccatgctctgccactgggccattcccctagccctcctgcacactcctgagttagtatcgtgtggcccactccttcacgtctttaatgactcttattcagatgtctgggacctttcccgaccacattctataacatagcagtcccagaatcctctgtctcctcagcctgcgttactcttcatcacacttattactattgatcctccaactagatgacaactagaaagtagctcaagtgttttgctctgttacagccctcctacgcagagctggtccatcgtaagttgctcaataaataccagtggggctggactgatggctcagcaattaagagcacttactgattttgtggagaacccaggttcaattcccagtatccacatggtggctcacctgtaactccagttccccagggtctgacacccttctgacctctgtgggctcctgcacatacggggtgcacatacatacacactctggatcacgtagatatatacctatatatttacatttttaaaaataaaaataaatattgaatgaatgaatgaatgaatgaatgaatgaatgaatgaatggacaaaaaacaagttaatttgatgtttgggaggtaggaccaatgtttttggtttttggggggtcttttggtttttggagtgtttttttgtaaaacaccggatataagtagtaaggaagagcaaggaatcatgggtcatatgaggtctctgcgttggaaaactgaggaagtgatggtgcaaaattctggtataggaactgtcttagttggggtttctgttgtgtgataaacactgaccaaaaacaacttgaggaaagggtttttttgttttttgttttttgttttttgtttttttccttacacactctgatcataatccattatgaagggaagtcagggatggaacctggagttaggaaccgaaacagaggccatgggggaagctgctgactgacttgccccccatagcttgctcaacctgcctctttaccctactcatgacccactcaggcaccacctccagtgtgctggccctcccacaccaactattaatcaagaaaatacccgcccccagacttccctaaggcgaatgtgatgcagggacttcctcgattgaagttccctcttcccatatgaccgtagctcctgtcaagttaacaaaaactaacagcacaggagccatggcacaagcgtatgtgccggtgatctgagcacttcaggcatttgagaagcagaaagtcccaggaagggggaaatcttcttgaccatgtggataccctaaatcctgctgcttgctagttttgtaactctgggtaatcaattaatctgtctaaacctctgttttctcatctgccattcctccctcatgggctgctaccttctgagtgctaagcacaatgccaagggcagagttggcgcctagataataacatctatgatattattgtaattagatcatctccgcccaccaaaaagttgcttcttctggagtcaagctctgtgtcctgcagtctctcattctgcactctgtgcccgttgggcagctccccttcatgttatctcattctccttgaagcccttctcctccagcctgaacatcgctcctgcatccttgtaggaccgtcctggtttgcttgctttcctttggggagttgcactttgtctcctctactccgtagacaaacccctgagcctggacctgaaactctcttcatgctgaaatctgtgctttgtcgccattgctcacattggttatggatttgattgcccagacagtatgtgtgtctgtgtatgtgtgtatgtgtgtgaatgtgtgtgtgtgcatatatgcacatagaggtcggagcctggtgcttgccaactaggtgaggctggttggtcacagagccctggaggcctgcctgggtcttcctccccagtcctgggattagaaacacgtgtcaccctacccagcatttgtacttgggttctaggattctaactcgggttcccctgcttacactttactgaggtagtgccctctctccccggacctcagattctttgatcacagtctttgattctctctttctcattccaatccagagttccaaatcagacaccggattgtctggtccttcttgatagacttcaccagcagcctttctgacaatgccagcaggctcttcactcctgatcagacccctgaccatctttccaagtctctccttcagctggactaccccagtaaatggaatgctctcgaatgcctcagggaccatcccagtagatgggatgctctcgaatgccccagggaccatctgttgtaattgatccagcttctctctcctgcccaggccatgatggttttctaagtgtactccttagcctcagcaatgatcttctctttccacccccatcgatacttctaatctcaccaccgcctctgctgtctgccgctctcttttctcttagggccacatttttttttctctccttatgctctgttcctctttccctgtcattcactattcagctctgacttctcaggaactgaaatccccaccctgtggccagcggaccaatcacactgttctgtctatgatctccgtatcattggttcagcccagctattttggtcggctgtacctgcaattcttctcactttcctctgagttttacacctctctcggcacttagaaggtgtcagacatcttggagttagttaactgctgtcaaggttagacttctgacatggctgatgattgattaatgggtcaaggtgtaaaaagatgggaagccaaagcataactgataaattccagcaaatactttttttctacctttactagctaccaggatttatgctaaatgtcttcgtacattacttagtaagccttctcaagatggattcctttccttggtgctcagacagtgcctcccaggccaactgttcattcatttactcattcatgaacttggtgactattgaatcagacactgtgctaaatactgtagcgggtttaaagaacatgacagtctctattccccaggaactcagtgtagtcggagaaaacagatacaatgagtgaacaggtgtgatgcattgtagtgactacatttagcagagtagacaaattacttcagcaataaagaaggccacctacttctgccaaggtttttaaggaaagctgaatgaaagtggggacatttgaagtaggccttgaagtttgctaccatgtatcaagagaatggggtttgtggccaccaggaagagcctggaagtgttaaaggacaaagaatgtttggagttggtgtcttcggtgtgatcaggggcttcttcctagagaaggcagtagaggctgtgagtggtagagatgaggtaagcagtgaattcagttcactagtctgtgctccatgctccttagcagagagaatactgcacagggtcttagtgctttgatgacaggatctaacctgggagtcaatgttagagcaggtgaatggctgagtgacttggccacttccccaacatttgcacctatcagtgtttgaattttatggctggtcctaggtcaagggtccagtcccaagtgattctttgtcatatgaccactttaataatagatgaccgtataccacgcctcttcatttccctccttccagcctcttcacctaccctcacccaaagtccccgtcatttttacatatttctcagactgtatcacccatacctgctgggtagttccaatttcatctccacctggatgtcttccatgacctcacctttctctttatccctctggttcctgtggacaagacagctcactttctcccacagaatcctctccatgtctgttctatgaagctgtatcttcatcacaggttcacttgtcagtttgtgagctccttagtcatcactgtaccccaaaaccctacacagtgcctagcgcgtagtaagtgtttgctgtttgttggatggacacaatgaacaactaaagcatgtccaactctgtcccaggcactggataaatagagatggaaggagccttcccacaaagagcttagagtctggtggatggtgatacggaatggtcggggccccataatatctgtaataggggtttagtgagcacagaggagagagaactcactttgcctgggaagtcttccagaggtagtaatttatggattgaacattaaaatatgaaaggtttttgccaaactaagaatactcggcagagagaaacgtatgtgcagaggcataaaagagaatcggtgttgggggactgtgagtattgacactgtgcagcgtcattctgaaggcaaaacatgttttagacactgaatatgagaggggtaaagctgtcgctcttttgcggatgttccaagactattattctggcaatttggcttttaatcagttttatcacaaggcagtgaagatgttatagtcatctttggtgaaaaataacaagtaacttacttgtagtttctagcagctaccttctaaaaatggtttgatttgacttacagtaaggggcagagtcacaataaagttgtttgtatagaaacaaaacccaaaagctctcggcctcagttggtagagtgcttgtccagcaggcaggaagctttgggtttgacccctagtgcccaataaaactgggcatagtagcaaatgcctgcaatcctagcacactatcggaggcagaaggatgagaaagttcaaagtcatcattgactgcaacgtacaagtccaaagcccgcctggcatatacaagaagggaatagcactatttcccaaggtacctctcctaatctcactcatcagtactcagatggccttctgaagatggacagaaaactgggttttgtggctgcaagcctggctttgggggtgtttctgacacattaagaatgtagaagtttcactcattttccagtaatgacacagggaacctcggtgctctcgtttctttgggtttccatcccctctaatctttggggtggggcaaactcctttaccttgctatcctgtggtctctttgggtttccctcccctctcacctttggcgtggggcaagctactttaccttgctatccttcagtctcactgttcatgtgaccttcactcaaatctcttttagtctcttgccctttttactctctctcgtttttttgttgttgttgttgttttttttttttttttttttttgtagtgtttgagattgagcccagtgtctttgtactcactagttaagagcccaaccaccaagtcatatcctcagccattttttttccctttttagaaaatgactcctgggttcaatccccagcgtgtgtatgtgcactcggacacacacaaacatacacatgcatacacacacacacacacacacacacacacacacacacacacacacacagttgacatcaactaagacttttaggaagttgacaggactaagaaccgacaaccctccacctgactctccaactgttagcattttactgcatttacttggtctagctatctctttctctctctcaaaatatatttatgcatttattttggagcccattaagcaccagttgcagataccacacattcttatgtaagccttcaatgtgtatttctgaaaggcaagaaattctcttacataatagattttcctatgcatttattatttatatatatatggaatatgttgctttgcttatttataattgtttataatggattgctttgtggggagatggtttagcaatgaagaatatatatatatatatatatatatatatatatatatatatattgcagtgtgatgctatctatatcagattgactttaggcacaatatgttttaggagggaagattccatgggctattctacctcagtgaattagctgttcctatgctcttacatgttaggcttgggtcagtggaaagcatcaaattcatgaataaaaggggcagagaaaagctctgaatgctgcgttagagtcattctgtagccaggagatatccaatgagagattggcagtgggggagtgagtccatcagagttccatattctggagattaacggaaccatgtctgcagggtggagtggaggagggggtaaaatgatccccgcttttaaaggcaaatctctgtcacatggggcggagaggaacctcctccagcataacgcatcattttctttcacacgtctttcagagctggttaaaatcctatggctatctgcttccgtatgagtcacgggcatctgcgttgcattcagggaaggccttacagtcagcagtctccactatgcagcagttttacgggatcccagtcaccggtgtgttggatcagacaacaatcgagtaagatttgcatagggcatcgtgcctttgaacctcctggactctgtgttcacatttgtgatggtcatgctatgcccgtcctcctgcctccttggaagataataccaaacagtgaccttccatggttcctgttctggttcattctccacatgccatctccgtccccaccccacacctcctacccccatctctctgatattaactttatactgtgtaactggagacaagtcgcttagcccttctggtcctcagtttcctcgtcagtacagtgagggagtgggttatagaagatctctctagtctcatcaggtcccaataactaagagctctctcagccatcctctggggtgccctaagatgtgtgtgcatggttcgcttgacacagagaagtgtggagcaatcacaggctggcagttcttgtcccacttttcccatttaccaagcacctgctgggcgcctgcatgtgccaggcactgtgcttagccccagcctcctactcagctgttttgtgaaaaacacagtcatctggctatgccgtcctagggctcagaaacataccaaccccagggagatgccagggaggcagtgacataaacccagccatgagaatacttctcaccactcagggacagcacaaagaggttagagagcagaggctcacaaagccagcctagaaggagtggccagggaggtgaagacctaggggaagtgacgtcgagggcatggccagctgggttagttgctgagtggtccaacagaaaggtggctgaaaggcgttgttgtgccttaggaatcaggagtttgtggataaactcaggagattggtggaaacaaagtcagaggcactgaggggaagagaccggagctgagatggcaggagaggaaaaagttttgagaagcctgagaacaaaagcaagagtaagaaatgggtggtaggcagaaaaagacacatttttatttgtttctcgtgggagaaagttgggccagcaatgcggctcactgggtaaaggtgcttgttgcaccagccatttgttaggtccccagaatccaagtaaaggcagaaggagagaaccagctgcacagagttgttcctaatgttctatatgcatgtacgcatgcatgcatacagacacacacacacttgtaggggcctggagaaatggctcagcatttaagagcacttaactactcttgcataagacccaggttcaattcccagcacccacgtggcagccacaacctcctgtgaccccagttccaggttctggtagtgtcttctgacttccaaggtctcctgcatgctcctgctgcaccaacatacactcagacatatacacacccatgaaaaacaaaacacatatttaaaatagaaataaatagaaaatttaaaagacgaaagtagcttgataatatttggtttggttttgctttgtttgagacaagatctccctacatagcccaggctgtccctcaactcatgatgtagaccaggctgtccttgaactcacagaaactctcctgcctcccaagtactaggattaaagatatctggctccattatgcctagccttttttttttttttttaatagccataggctgataaagtgggcccagcaggtaaaagtgcttgccacacaacctaatgacctcagttccatccctagatcccacattaaaagggaaaaaaaagtctcctagaagttgctctctgaccttgtgtgtggacacatacacactaataatagtagtaaatataaataagtaaaaaaattgaactaaaaagaaaatctccgtgaaagccacttgaactgtttcagaagagacatgcaggccaggcaagcatagagagagcagaagtgaagttctaaagggagagatataggagcccacgtgagggtggaggcagatggcagggctggctgaggacacgggagaactggcaggaggcgaaatggaaaatgcacacaactgtggctcaaaaatcagttcatccctcagacaagttactctgggataggggactcagagtgctgggtttgcgatcaaatcctgagtccattattccaagctgcaaaactcttacaacttggtgatccgtaattccatccaagcgtttcctagtccctccttctcttgctgtgatattgtgaaattcagggacagtccatccgaaggctccctggaggctgtcagcaacatgtttgctcctgggccttaccagtgagtggctcttagatcctagcatccttcctaggcccaggttattttgaggcatttgtgcgggcttcatggcagtgcatcctgggccaggagcactgatgtctctgctgaggcaccacctggccttgggttttactctgttccagaaagccccaggcctgctggacagggttcaaaccacagcaggtggatgggaaaagagaagacaaagggaaggagctaaggaaagaggtaacgttgcctgcccacacttctgcccgcacttcttttgggaggatgggagcagtattctggacacacagaaaggaaaaggctgttcacacggagtccaagcctggatcgggatgggtggaattcagagggctccaccctagctctgtgactttgggcaatagtggcctttccctgagcccatctcctgacattgggctctcaggtctcgctcagccttacagtagcagggatggcttttgcttctctttccagggtatatgagtaaaaggaagcttgattcacaatttcaaatactatttttgagtgtttaccttgggaaatgccacacatttattccttcactcattcctccagccacatagctcctctaactctactctgtgctaaactgcatttaaagtcctccaagtcagtgaagttgcagccctgcctcactgacttctgtgttccaaatgacctgattcatccacgaaatcctgacgacctgagttcgatccctgggatccatgtcaagggagaagagaacagatcccatgaaccatcctctgggctccatgtataccatgacatacagcactcctcaacacattgtgtacatgaaaaaataataaacagctgggcagtggtggtgtacgcctttaatcccagcactcgggaggcagaggcaggcggagctctgagttcgaggccagactgttctaaagagcgagttctaggacaaccttcaaagcaatacagaaataataataataataataataataataataataataataataataaatttttaaaataaaaattctgctaggcagtggtggcacatgcctttattcccagcacttgggaggcagagacaggtggatctctgtgagttcgagaccagtctggtctacaagagtgagttccaggacaggttccaaaaagctacacagggaagccctgtctcaaaaaaaccaaaataaaaaaataaaaaaaataaatattctaaaagcagtccaggtgtaattgtgtctgcttgtaatcctaacacataggagacagaggcagaaggatcatgagttagaagctagcctcggctacctagcaagatcccatctcaaatcaaagaactctgagagcacacgaatgcatgggagctgcaaatgtttactcgggtgtgtgctgttgctgttgtggcagtccattactgccgtgagtgtaggtcactctctgagtgagtggagcacaccaagatgagtaagaactagttcattccctctagaggctttcatatgtggttaacacggacagccttcttttttccattgccaatgacaactgcttttaacagctgtgagtgaggtcaaacactttcccttccagtgatgccaggctatagttcagtgggtcagctgttagacagaacataaaatgcagacagtctgaccctagtcagttgtgggtttttaaatctcctgctcaggcccctcttaaatccccagcgatgttccaggcttgttccctggtgtgcctttacctgataatgaacaagtttatcaagatttactgagttccatgcactagactagctttgggacacaatgacaaatgtaacatggttcctcaaagaatctgccactattagaagcaacaaatcaatatctaaaatcacaatataatgtaataagtgctacagaaggttatattctacgtcctgtatctgctcagagatttcttttgagtcaggatctggctgtgtagactaggctggcctggaacacactgtgtagatagatcaggctggcctggaactcactgtgtagacagatcaggctggcctggaacttttgatcctcctgcttcagccttccaagttctgtttttctttttgtttgtttgtttaatgtgtgttgatgttttacctacatgatatctgtgtgaaggtgttgagttgcctggaactggagctacagacagttgtgagctgccatgtagatgctgggaactgaacccagatcctctggaagagcagtcagtgctcttaactgctgagccatctctccagctccttgagccacttcttaaacacctgtagtgaaagacatttactgtccttcatgctcttctgttgtcgtgttgaagagttctgattcagtcatttattcagtcagtctgtcatcggttaagaaatcattattgacccctttctatgtgaggcactgtgccagccctagggatacaggggactcccctattcttatccagctcagagtatggtgagaaaaacaaagaaggcagatgtatacctttcgggaagtgggaacctggagaagggaacattaaacaagttaagccatgttattgttttacatcagttcatcagggaagctctctctgaagggcagagaccggaatgaagtaaagggacaaactacatgaagacagacagacagacagaaaagcagacagcaaatgcaaagactctggagcagagatggttactatagcaaacagcgagacaccactgtggctggctatctgacaggaaaagggtaacacgctgctggatacatgggcgggggctagaccatgtggagcactgtagtctgagctgggagttagacttttattgcagttatgatgctgacgaggaaactggggttcatgttgatttcatcccttgcctggggtcctcgcttggtagaactagaacttacagtgtctcctgaatccagggtcttaagtgtttattaaacttaagtatttctccttgggagagaatgaattaatgaatcagtccatctgttaattccttctgagggtgtgcagagtgaaagtcccagaatctaagctgagtatgtgcactgccatccagactggagttgtgagctgcacaatgccttcctaggatgttcagtgaccataatgcctatgtgtatgtgtgtgcgtgccttctctctgcccaggtggatgaagaaaccccgatgtggtgtccctgaccatccccacttgagcaggaggcggagaaataagcgctatgccctgactggacagaagtggaggcagaaacacatcacctacaggtgttgcagccccttgcttcctccctggttttagttcccatgctcactctctttttcctgcctaagtttctgaagttcacatggtaggtatgtcttcaggtgggggagtcaggacaaaggccaggcatgggacatcaggaccagatgctgagagcctgtaaccctgtcttccttgtgacctccgcaggtgactctggcttcaggtttcctggtttgcctggtcctttgggaattagctgtgttctatttagacacctacagttactgaacacggggtataaagtgtttgtaggattctgctgtgtaaagacccaaggcagagctcactgttcatgcttataaactgccctgcctctgctggattcccaatttcagcctgacagacttcacccaacatgctcaatgcagacagagtctcaactgtttcttaaggagagtaagggatggagacatagggtcacaacagcgtcactctgtgagtggagaagccagggcagagcagattctgtctccaagccccacaatggctaacacgaggataatgaaagccagcacagcagggccagacaccaggactcacagaggcttgggcagggacctggctaggaaaggctccaatgggctctgcttggcacctctcagaactctgattccacctcaggtcaattcccacggtacagtcaacgaacccaagacagagatcactgggttacagtaagagctttccttacgaccagaagtagatatcagaacaggatttttttttttttcttaaagagaaggaaacttaagaggcgtctaggttagaagactcttgagtctcccaaagacgaggaatggatcaagaggaaggaaaaaaaaaatgtttctagctctgttctgatcttacctctcattactcaacttctctaggcctctgcttccttcctatggaacgggtaagatgatccatgtacccagcattcttggggcagagaattcataagtagtagtgttccattgtggaaaaccgtgtaccatagatacagttagttaccttaaagagctaagtcaggcgttggattaagtcatgtgctgccctacaccagctgctgatacaccagcaatagctagttcttttccacttaaatgcctctgtactatttgagtatgtttgcgacttttacaaatgtatattatgtgttcggagagaaagagttagattttaaaggagtctgcctatcaattgctgcacattggatggaatcccttatgcaacataagccttgtcaggaataaaaaatctgatgaaaacaaagctattctgtgggcaggggtgggggtgatgctcttcctgaagaccatttagcctggtcttcggcccccagggcatctcagtagaattccgggactcgaaatgtgcagaccactggaccatgctggctctgacagccctttcagtttcactggtctctgattctgcctttctttctaatgatccttctctctttcaccagcattcacaactataccccaaaggtgggtgagctggacacacggaaagctatccgtcaggcttttgatgtgtggcagaaggtaacccctctgacttttgaagaggtgccataccatgagatcaaaagtgaccggaaggaggcagacatcatgatcttctttgcttctggtttccatggtgacagctccccatttgatggggaagggggatttcttgcccatgcctactttcctggcccagggattggaggagacactcattttgattcagatgagccctggacactaggaaacgccaaccatgatggtaagtacatgaaaggatggggggcaggaggggatgtcagtgctgggatgtttaattgtcagggaaagatgcaccaaggatgcacttggagacaccattaatgagagacctgcttcccagaacttcttgtttaaaaaccaaggactcaagagagtgagagctgtgatctctgttaatattcaacacttgatcctgatccaccaggaccaggccataaaggtcattgagaccacctagaagttggtctaattgggctgaggcaggattgaaccatgaataagaaaatggtatgtcagaggctgaagaaacagattaaaaggctttaacatagaactggagatctgatgagttctcgtctcaaagctactctaagccatggcccaacctttctagcatcctcagataactttccttgcactactgtgattctgtggatatgcacagaacatcagtcagtatcgggcagtattgccactcatcattaaagaattcatccatatgaactaagacactcacttagcaaatgggaatggacactatgttgtgtccatttaaatttttatattacattcatttatttgtatgtatgtatgttgtattggtgtgcacacgcacagctctcatatggagatcagaagacaacttggggaggtcagttttctccttccattgtgcgggtgaatctcgggaatcagactcaggtgaccattcctggtggcagaacttctttacatagagtcatctcactggcccaataatctatttattagacttatttggttagttattatttgtgggatgagtgtatcacatagaaagttcagagaacaacttgtgagagtcctttctctacttccaccaggtaggtcctagggcttgaacttgggttgtccggcttggtagcaagcatctttatccactgagctgtcatgccaactgttatgtccatttttaagatgaagagttcaaggctcaaatggtataactggtaggaggcggtgctggaactcaaactcaattcaacatcaccgtatgaaagggctaaggatgtagttcaattggtagagtctttgcctagcattcataaagccctgggttcaatccccagcataatcaaagagtggtggtatgttcctgtaatccgagtatacaggaagtggagatgggtgacagattaagtaatctctaaggtctcgtccaatgctggtgtgacatggtataagtcctgcaaagaccaaggggtatgtgaatatttaattaaggagtaggcagcgtctgccctctgaaacccagagtcaggtgtctatataagtaaccaggccataaggcagactctactgaaggctgcagtacatgtgccaagaaaatgcaactagaatcagggagattcagccttcagattatagtagatagtaattaatggatgttagggttctaaggttcataccaagtacctcccacacatcatgccataagtaggtattatcatccttattttacagataggcacacaaaagcatagagaaacattattctatctaaggccccatagttagtcagtagttaaacaaggctttgaatttggatattgtaaccctggagcccataccctcagccaccactatgagtaatagtttttctgtatgcccgtaataggtttctccaccaacacagtaagtcagatcaagcctaacagaaaaagtgtaacagcgggtttatttgagcaaagcgacttctggatgggttctccagttcccagagatcaaggccagagaaatcacacacccaaactaaagcagggagattgtatagcttgtaggcaaggggtgatgacatgtctgccacaagctgggtttttgtccaagtatggtcaaaagttgaaggtttaagcagagacttgggctgctggcaactggggaggaagctgcagcagtcaccaagaatgctgtcttgggttgtgggtgccttttctttgttggagattctctgagaaggcagggtttggagagaggggtcgggagagaatggggctttccagatcaagcatgagtgaggtgaaggttccaactaaacactgagtttccatggatctcaaaccacagggaccatgagactcaccagggtctatttagaaacatggattcctgtccctggagatccccatccttaagctggataaagtttggaaaacaaaggacacctgttcctaccttggcacagcttatgggtacaggcaggctcttctcggtccctccctcataagccatgtctggtgtaggtagatgggcttctcccttgaggtcactccagaccactgtgtgaatcagggctttgctcctctcagcatctctccaacactggtccagtgccactgaccaggcagttaagagactgttcagtttctttgtcctcttccctcttcggattttgttatgtttcctgtgaagctccatttcctctggcttggcgtcatctctcctatgtccttgataactttcctgaccctttgtgtacctagtctttattttactcttatttttggagtggtgtcaacaaatgactatgactactgataaggagtcaggggaaaaaatttatcattttcaggcctgttatgtgccaggcaccattagctgaaagggttctagttttagttctggtaaacacaactgaattttctttgggccggggtgttgagactgggtttctctgtagccttggctgtcctggcactcactctgtagaccaggctggcctcaaactcacagagatccatctgcttctgcctcccaagttcagggattaaaagtatacaccaccactgtctggttcacaactgaattttcaaagggttattttcctatagaggtgctagaaagaagtgcccctccctccctttctgccaagccccagggtctccacagtcatgcccactccttgcttttgaggagcttactaggtcagcctgcagtcctgagaactggtgtgtgtggcgtgtaggaaggacctagagcctgtaaatggacaccattgcaacacccctccctcctgattacctcacctttaatgaacaacctccagctgggataggaacaggggtcaggacattgctctataaaaccagaggtgaactgggtaccacttacaagtagatccctggctgacgggagtgaactgctgagcactaccccaagaagggttgcagcagtagaaaggaaccacaatttattgagcacctggataatgtggcatttgattttcacatacattcagtgagggagggagcaagtgttatcttagctggtgttatcttatccctccaagtccatcacccttcagccccaaataagcacacagatgctatgttaattataaaactattggccaatagctaggacttcttactgactagctctctcttaagtattaacccataattactaatctgtgtatttctacatggccttattttaccagagaatgcctggtgcgtcctatcctcctggtctctatatggcatctccttccatgtctacctttcccagaattctcctcatctcttagccccgtctgtcttcttgcctctattggccaaacagtgttttattcatcaaccaataagagaaacataatgcagaagaacatccccatcaggcaggctctcctgggacttggtctgattactgggttgctttcattatggaacattttcaaactctctagaggaaggagcctgaggaggatcctagatcaccatcctctgctccagtgaccaacactgttgttcctactttgcccaacacttccacttttattttattttccgctgagattttgttttgttttctttattttatgtatatgagtgttgggcctacatgagtgtaccaaaagcagtgtccttggaggctggaagagggtgtcagggtcttatggaactggagttacagatggttgtgggctgtcgtgtgggtgttgggaaatgaaccctggtcctctacaagagcaacaagtgctcttaaccactgagctagctctccagccccatggctgatgtattctaaagcaagacccaggtataatatcattttatatatgactactttagcatgtcactctaacaaagaccaaattttaatataaccacaaaatcagtatcaaactcaacaaggttaacaacttcttaaaatctaatgcccagagctctggtaaagtgttcaagcatggaaacccgagtttgactcccagaactcatgcaataaagccagatatggtgtcatatgcttgcaagctcagcactggagaggcagagacaggggtatgcctggggtttgctagctacacagcctagcctagtaaggaagcttcaggtccaaggaaagaccctgtcccaaaatacaaggtgcaacaatgcccaaggttgacttctggcctccacatatctccgcacatacaaacacacacacacacacacacacacacacacacacacacacacacaaacacacaccaccccagagtgccactgaattgtgcatatggttctcattccctccccccacaaaggcgcaagctagcccatcccacctaaagccattttcattaaactttgtccccatttctttaaaatgagtcaaccagtgaagtcagcagatactcggctctgccaggagggaacccagccctctgtgttccttcctaaaggaaggtgacaagccaggaagagccttcgtgaccataccctgcttcacagaacagagcctttccacttagctcactaactcatactccacagcggacttaggggaggtactgaaaaagtcacacagttggaagacagcagagccagatgtgaaagtgagatgccatatctctgacagtccccccaagggtctgcagcaggtggtccagggacagaacgtggaacactagagtagttttggcattgtccccgcctggtgctgttgccttactgtgtcaaactcaggcagctgagccatttttctggggctactgttcccaagaagctcagtcttggggcagaatacacacccgtggctgtaattaatgaaggttggaaaatggccagcacctaaagctgcctgatattaagatgctgacagggtggagaaggcacaggccagctgggagagccaggctggtttctggggagatgagcactggggtgaactttaaaggaagagagggaattttaggggacaccgctgataagcacacagaggtgaaaagaaatgccttgggtgggtgctattggagtcatgaagacaggaatccacaacaaggaaagttcatcttgaaagaggccaggtccacgggagaagccaagcagactgtcatgctacagggcccaggacttcctccacacagacacctgggacgctggtcctctcacacagctcaacacacagtgataatgagtaatgatccatctgcaccaagccctggtgtggcactttgtttaccctgactcattaatccttgttgctgttcttaggaggacggcggccattattctcttcgctgcagagaaagggctcttaaaatgccacaccgctaggacatggcagagctgcagaaaccacactctgatcactcagctcctgcctccccctttttggggagtgaagaccctaagagcctcttctccatagctgacccccacctgttccctctgttctctcacaagttcagtgtggctgctctcccctcccctccccttccctcctctcccctccctctgtgcagtaggatgctgcttccccgagtttctcttccttttggtcctgggaagaaacccacaggcctctttgctttaaggatttcactgtatacagaataggcacaagccaaggacaatggctgagagtactcaggggctctctggccccctgctgaggtccctgtggatggtcccaaggagaggcctggtcaggagagaggccctgaacagcttgtccaggtagagcagaaggccaggagcagagccagggcaggctgcaggaagctgagctgccttctgccggctccagcagccaccttggtttggagtgaagctaaaagatgagctcactgcttccctgctgtgtgaagggaccaggccctgaggaaggagctgggggcaacctggctttctcctgtcagcctgcctttctcagcagaaggccggcccaggcttttggccaaccttgcaatgatcttggccagcccccattcctctccattgctcaaaggtggcatcatggatgacatggatgacgttgttggtgtcagtggagagtcagtctggcctgtagcattcttctcatttcccaagaccttactcaaaaggccagacaactctcatcctcatccgactctcccggggccttgatgggctggggtaaggcaagtctgccagggatactagacccagagtgggcagtaaggttcctgacccctggtggcctccctggacttcaaggtggcagaaaggaacggagccatgcctaggactgggagataagaggtaggtctcatgggtgaacaaatgccagaggtgtaagcaggagtctgtaactgagcagagaggagccagatgcaatgccctgcccaactcctaggccaatttctttcccaatactataattacctaatgtctacaaattcaggccttgacctacccacgacttaaaatggaaattgaagggagctagctttaagaaaatctggttgctgaagccccaccaacctttcttgctaatgggtttactctggcccaactcaggtctttcgtgctgtagcaacagagcaactacatcatgtgttttacacctgttagttattcagtccccacccaaccaatgagttagtccagcttctccttcctacaaatgaaacgttgagggtgaggtgttgacccaagcttgtaagtgtggcactggaagtggcggtgacctgtcccatctcagggtgctcacaaccagcacacctcaccgtccctcagtttcatgttcaggatcccgtgtcctgccttcagtaccagatttccacccgttcttgtctctgcaccttgattttgtgggtaattccaggaatagggtcctgctgtccccctaccccccagagccctgttcacaccagccaccccaaggactttttcttgtattgccatggcttccttgactctgctgacccagcagcaccccagcacctgcaccccaccttctgaactgaccccactgatctacctgcctcggatcccctttgcctctgattctctctccaatggtaaccagggtgacttcatcatgcccccctcctctcctgctaccccacaccccgctatggccaagaaactgatccaaattcctttgtagggcatcacagagccctgcttgccagcctggctgacctcatctctccctggccctcccttcgtgctttgttctagagccaagtgaaatgaactgcttgtccctggacctggtttatagcagcacctctgccaggaatggcacactccaccctcttcctccctaaccctgaatccattctgcagaccaatgttttacctttcaagactcagcttaagtctcacccatgtggcgtcttccctgaacaccttcctccaatccaaagggacttagtagcacagacatgtagtcccagctgaggcaggacggtttcaagttcaagaactcaaaatcaaaaagtacaaagaggtcttgggatattgctcagtggtatatgcaaggcccaaaggtaccaaaaaaaaaaaaaaaaaaaaaaaaaaaaaaaaaaaaaaaaagggtgtgggggtgtgtgcaagggggaaaaaaagagcccaaaagaaaaaaaaaaaaaaaaaaaaaaaaaaaaaaaaaaaaaaaaaagctctcaatctttacacatgtctggatgcctggatactgtgtagcctttgcagtttcttcatgtacccctctgcaccaatcggtacacaggcaaagattgtgtttgatttctctatgtccccagtgtcgaacagaaggccaggggcagagacaggggatatgctaagtgtttgatatgctaagtaacgtctgttactgactaatactaagtgggtatcctggatacctcgttgtccctctccacaggcaatgacctcttcctggtggctgtgcatgaactgggccatgcattgggactggagcactctaatgaccccagtgccatcatggcacccttctaccaatacatggagacgcacaactttaaactgccccaggatgacctccagggtatccagaagatttacggtgtgtatagtacgggggaggggggtatcactattgttaatgtgaacattgctgttgcaggtgtggggccactgttgttaatgtgagcatgccctgtggcaggtgtggggtcaggatctttgccattgtcagaattgctactgtgtctctgtgctgacttaaatgaggtccccctagcacactgggaaacctaagggagagaatttgagctgtgactgggaaaggtaaaatgaggtgaggcccactcattctcaccctttcccacccacctccctttaccagagggggaccaggcacactctggggtgcctctaacctaggaaagtcacacatctgcttgaataatggtagtaagtattatatgtgaccttgagatgaaaagctagcttgctgtcctcataagatatgaaagcctaccatgtacaagtcccaccggcatggagagtctaatcaagttagttgaaatgggagaccagttcatttgagcaaatgttggtcaacactgcactggaggtgggggtccctctggaggaggtgcgacaaccagggcccccatcacaacccacggtgaagcagcagggggcagggtgggcagccagtactagaagttatttcaaaggtggaatggtcaggatctgctgacagatcagattgagggaaagaaggaacaggtcaatctaatactgactttgctgtgggtgtggctcagctggtggagtgctcacctagcatacatacatgaagccctacatttggtctccagcaccacatgaaccaggcatggcagcatacacctgtaatcccagccttctagaggtagagtcaagaggatcagaagttcaaattcatcccctttgctacataaggtgtttgaggccagacaggggtacatgagatcctgtcttttaaaaggggggggcactctggtatttgtaactgtagattaccccaaagatctgagtgagcccatctgggaactccctgaagatctggagttgtagaactcccctaggtgatccacaagagctgtccaagttgagaggcatgacaaagggaaggaagaaaagagacccttaagggtacccagtctttggagcagggtggactcctctaacaatgcaggttaatagagaatccccccaggggcagacaaaccaagagcacagggccatggaaaaggaggagcatggttcaaggcaaatgtttccagaatcttgctgtccaacttgtgggtctcaggccagtgacatgggtttcacctgagaccttgaagacatattgtctctggctccaccccaggccctctgagtcacaacctgcattaccaagatgactcactcgatcaacaaagttgataactgttggtttccgaaacccagaggtcattggtgaacttggcaagaggtttgggtagaaaatggagctgacgctctattgcagttgccgaagaatgagcgtggttagagatcagagttcagccagtgtgaaggagggtagcaaaggagagtgtgggacactggccctcaggaaggacaagtttcttctttaaaagggaaagatgccagccttggggatgggaaagtgaaagtccctatctaatggctgtttccatctattttcccaaagactgagagttaaatcagggagaggggacaggaagtctgaaatgataaacttaacctagaactgcctatgtagtgatggggcaatggcagatgacagtaagaaagagccacgtcctctctaagacacagcccctctctccaggacccccagctgaacccctggagcccacaaggccccttcctacactcccggtccgcagaatccactcaccatccgagaggaaacatgagaggcagcccaggccccctcggccacctctgggggaccgaccatccactccaggtgccaagcccaacatctgtgatggcaacttcaacacggtggctctcttccggggcgagatgtttgtgtttaaggtaaggttggtggaccagggccacccagggtgtaccttcccctacaatggagctgggcaggctcctgctctatctgctcttggctgctgtagggcctggacaggagctggtctagtgtccaggacccatagtcttctggagctgacaggtcaatcaacttggttctacaaggtgacagagagattggtgagctgacagcttccaaggagccaatcagtgctcaagaacatgctggagctggcatcgggtctatgaccttgaataagtcaccttccttctccagacctcagcaatacaacctggggcagccattcctctgacaaaggatgtgtgaagattaatggctaggaagatgcagagcagggcctggtcagggatggcagtctatagctcctgccagggcatgagtgacaggtactggccaggctatctcgtgttccttgtcatgtgagccaaggactgcctgagcatggtgcatggcaggccaggtccttggagaaacagactctgagatagagtctggaatgagagattctgcttaaggacctttaggataaacagatgtggtcaggaggggcagaaagccagtcaggacagtggaagaaggtgaggagacacagacttggtgccaactcagcccctcatgggaagttctggagctagaatggcccatcacagtcattccatattggatgcaaaaatgaagctgaagccattgcaaaagccctgaaagctgaatgctgcctgctggtacagtccttcaccaaatggcagctggacaatggctctccatgacactgggtgccagaggaaggctaccccatttcctttcctaaggtctccccaggaagcttcaagcacaaagtaaaatccaggccatgtaggctagcccagttctgcctctcactaagtgcctgtctgtaggcatggccttcgtccttcctgaagaccgtgtgtgtcagattgacttgacagagttgtgcaagtcagaataaaacattttccaaactggacctgaaagtactttgtgaaacatttgaaaaacgctgagtgatacctcagtggttaagagcacttactgctctcgcagagcacctgtgttccgttcccagcatccacatggtggctcacaactgcctctagcttttagttccagagaatccaatgccctctgttgatgcctgcaggctcatgcacacaagtacatgcttacactcaggcacacacccatacacatgagtacattttaaaagatatcctatgtctgtactgtcttctgtgagtcatattcctactgcatcacttgtatttccttgagcctcccaataaagtgttcacaggcaagtgtgaattttatcctcccctttaccacactgatcccaacggatatcagtgactgtctgctgccctcccgtggccactccaggccttggcagtagtcgcctttctagccttcccacacccatctgctgtgtgtctcatagtccttgaacagcaggaggcttaagtgaagaattacatcctgtcttctaagagttggaagcagcagatggaccggcttgatgggaggttgtgaggctgagccccaggcttggtgttggattgctgggcctgaaccctggggctgagatcaccaaattcagaggtaagacctgccacctgcgtttctcatttcccccattcccctcaggatcgctggttctggcgcctgcgcaataaccgggtgcaggagggctaccccatgcagatcgagcagttctggaagggcctgcccgcccgcatagatgcagcctatgaaagggccgatggaagattcgtcttcttcaaaggtaacgtggggcatttctacgccctttttgacgcttcctttttcccatctaaatcagaagaggtggggtgggaagcatgggaagcagatgccctctgaagggccagatccccataggtaggacctaggtcatctgggaaaaccaagtcaagaaagtgtcaacattgacggggtaaaaaaaaaaaaaaaaacatgcacatgaagtacagggtaagacaaagaagaccacccagcacttgctggaaggtcactctcgaagttcggtaagagtccagacagctggctacccaggacatagatgggggggggggttaacatgcccagcctgggctagcccacttatgagctgtttcacattagtaatcttgacttggccctgcttaagctgagtaagatacagatagtgaaatgctaggcaagcccaagagaagtgaacaaggcagctgaatgtagtggtgtgtggaagcccatccaagggctcagaagctcaccctacagcctctgaggccctaccttggagagctagaagggtcctatgagagccatttctgaagagttgtggttgccagcctagaattcagtctggacctgtcaggccaaggccggaaactcactgcaggtttctgagtagcacagaaacatgggagaggtggcatgcggtaagatggggagggtaattcagaggacaatattcccatgaggccccagccagagaggaacagcacagctaaagaacatgggacgctgtgagaagacttggggcctcatgagtggctgagtactgagaaggaaggaaagaggctcagaaatgataccggcacttctaagggacactgggaggaagaaaggtgatgaaaaggaagccattctggtaggatgaggagctctgaaaacccaatttggagtagccagggaccacggaagagcacaggatatgatggggtggggcttaggtcaaatgggtatggggctatatcctcagagttagggcacataaggcagataggggagtgtgagactctgagagagtgtgcagagtggctgaagtcctgagtggatgtgtattgtttgacatgagccagccatgtcaatgactaaggaactaggacccatgggaaactggcaaccttccccatgtgggtcagacttagaattgatttattgtggtccaggtgggaatgtctgtgaacagttagccaatgtgtcaaaaaactagtacctgcagcttcctcaatcctgagactgctcgcctatggagacttccgccggcactaatgccttatgccgaggttccgagttgttgcagtagtaggtgctgctccatcacaacacacacataccctacctgaggccggccacaggaagtagtagcgtgtgatatcacaggtgtgattaccagaaatgaaagagggtcaagacaagtaggtaggaaagtgtggtggctacacccagcacttgggaggcagaggcactaggatcactgaaagtttgaggccagcctgagctacataattaattccaggctagccagggatttagaaaaaaaaaaaaaaaaaactttgtctcaaaaaggaacaccaaaaccaaaacagtgggacagagagcctgtgtagcatggtgcacattgcccaaaatctatgattggcttctcgagccccaaatctgctgggccaggggctaagaaaacacacattcagactttatgaagacaggcaagtggaccacaacatctcctggcactgggtggctcctgaaggctgattctagactctttccacaggtgacaagtactgggtgttcaaagaagtgacagtggaacctgggtacccccatagcttgggagagttgggcagctgcctgccccgtgaaggaatcgacacagctctgcggtgggaacctgtgggcaaaacgtactttttcaaaggtgaacggtactggcgctacagtgaggagcggcgagccacagaccctggctaccccaagcccatcaccgtgtggaagggcatcccgcaggctccacaaggggccttcatcagcaaggaaggatgtaagggccaagctgaggtgggaatggggagttaattttagtggttctcagggcccagacgtatgcttctgggtatccagatttcagtaatgtaacttggtaatagacagctgccctaaatggaccatgttcacatagtaaattaacttgcagtgatggataggggtggttcaaaggtgctttttcatagggtttgatgggtaggctggcaattgctcaccatgtaccatcaggcagttaccagcctgtctccctgccagattagaaacttctcaaaggaggctcaggctttaccagatgcaagcacccatgactgcctgttacactgactcttgaacagggtggttgggttcacagaccctgtccaccactcctaagtttgggcaagccatcgagctatccgtgaagtgggaatggtcacagcatttacctgtggactgtgtgataaaagattgatagggtaaattacagagagcatttgcgtaatacccaccacatggtctatgcatgtaaaagttgtagctgtcctcatcatctcattagtgtttcagtctgtgtaagatgacagaactgtcattcgacgcatggtaattaccgagagccagtttgtgtgggaggggctcaggacagaagcagtgagacttgcatagttatcagtccactgacagaaaataacgtcacaacaaagcgagcctcagagacagatgacatcaaagacgttgaccaatgaaagtcctggggagtcagccaatgaggagagtctgagtgagctgctttgctgtctgtcaactggctgggttgctaaggctgttgctgggagccttcagggagctgcctggggagtaattggagttgcctggcctgctgcctgcctcctttgcttccagccatcaaagccactagaagagtcctaagaacttgtatctgtgttacaaagtggtatatgtcaagccctccccacaccccccaaaatatctgtaattgtggagccatggtgtctgctgctaacatgaaattttgctcaattcccattggcttggggcaagagttagactgaggcactaggagattgctctgcgcaagccttaaactgagggcttgatctgacccttataggaagcctgggggcacagtgtaacagacctgtttccagactaagaatcatccagactgggcagtataaattaaagcacttgccagctctattcaaaaatcccttagtggtttcccagcacctttgaaccaacaagtgagattctccatgtcctggagacctgtctctgctgttagttactgtgcagccagtggagcactgcaactcacccagccacctccgttccagcaggccactccctccatctaccatgccccttggagcttctctcttgtacactggcaggcacatcaccccaggtccacattagtccagagtaggtgctggggcgcgtctgggaatggtggtactgagtccttcccatttctgcagattacacctacttctacaaaggccgggactactggaagtttgacaaccagaaactgagtgtggagccaggctacccacgcaacatcctgcgtgactggatgggctgcaagcagaaggaggtagagcggcggaaggagcggaggctgccccaggatgatgtggacatcatggtgaccatcgatgatgtgccgggctccgtgaatgccgtggctgtggttgtgccctgcaccctgtccctctgcctcctggtgctgctctatactatcttccagttcaagaacaaggcgggtcctcagcctgtcacctactataagcggccagtccaggagtgggtatgagcagcccagagccctctctgtctacccagtctggccagccaggcccttcctcaccagggtctgaggggcagctctagccactgcccaccggggccagcagggccctaggccaggttcgtgtgtagctgaagtggtgggtgcattggtctaggctgagtgtggggcagggagtgatggtggctgtgccccaggttgggtagctggcacccagttgccagccttctggcctgggtacaccactctcaagggaataggccaggccctgtcaggaggcaaggatcatgccaggaggtgcccctgaggtcactgcatcctatggtgtctgcaaggtacgggagctccaggcctggctgggacccagccctctgaggcaagccagcactagctctcaccctcccccctttcggagatgccaccaatcccagtcccctctgccaacacctgctggtcagatgtcccttcacccctaccccactatcctccatggctgcagtgcccctgctgccaacacagtgggcaaaagcctgggtttcccctgctagccaatagcagattcctcaggaaacctgatccacttgtcaggtctcccctgagacccaggatttagggtcacatgctgcaggcaaggctgtggcccagctgggtctcacaaggaccctgctgtcatgtcgtgaatatttaaatgtcctgtcactactgtttaaagtcccattttgcaaaggctatttgaggctttaggtcaattagaggtgactgtcttggtgatgcggccagtgtgatggcccctccttccccaggcattaaggaccacggtgctgcaaagagccactctaggaccctgatactagcaagggtcctgttcaggaggctcaacagctggggcaggagctgaccctggttctggaggcagatccaagtttgtgaccatcctctactccccttccatgaatgttgtccccaccctgctccagcctgtcttttgtggcatgggggtttagcctgactagttatgtggagcagagacggctctagagccaccattgtcatagcctcagagtaaaggaccagggcagccttttaagtaatccatccacatccccagtgaccctgaggcaactcaatttcttggcctggagtgggtgtttgtgctccggtcttgaccctggcagcccagctcactgggcccatcttcctgcactgctcttagaaaagggtactcctagctggtagcagccccaagctcactccctacccccacctcaccccacttttctttctttctttcttctttttttaacctgaggcccttcttcacatctgacaggagttcctaggttttggcttgacttgctccagtctggcagccatgcttgtcattgggcaagaccaatgggttcagtgatgtcactggctctctgccaaagtccaaaagcagtgagaggcaaccttcagggtgctagtgggttgccaacaccaaccctgccctctgagcctgcatgggccttgccctgccctggggcctctggatttgggttagcttaccctgtagcacagacagggactcctgccgccctgggagctgtggagtaaaatctatcgtcccagaagcatctatatgggtccactgtgtcccagcatcctcatcctgttttttctcatttcggcaaagggcaggctccctggggcaggtggggaacaactgcagagatttagtgattcataggtttgtacagtgttttatactttgcaaagcactttattagctcacacctgttcactcacatgaaggccctgagaggctgagggtaacactcatcttgcccttagaagcacagggaggtcttatctgcccctgccatccagtggccctggctgggtctgtgttcccaactgtgggtccttctagggtctgagataaatgtcttttctattcttctcttctgggcctccctcccccaacttcctggtccgtctcctcaggttggtgctctcacttcttgaaagctctaggccccgcaggctccctgttggctcctggtactccaagaccagttgagaacaagcaggagatggaggcaggcagcccaggctgcagatgtaagggatgcagggccgggcccagagggctcagcctagaggcttccaatcttggattcttctgcaggcagtcatctgtttgtccatcaccccaggccagagcagtcagaggggcaaagcaccgggcccccagagctcagcttcccctcagcctgggtgacatcacagcatttcagtgtcggtcacattttaaactgatcagcctttgtataatgttttttaaatcatttctaaataaaacagaaatacagtgtcttttccctggggtgtgggaacaaagaccagggcccaagtgtgcccttaagaagcttcgggggagaaaagggtgcacgggggtattctgcagttgtctcatgcatctatctgctaaccagcaatcagatgtcctgcccccaggtccctcaggagtatgggagggtcactgtttgcatgcttctctggagacagggcacacagggccgtgacctgggacacctgaagcagctcagttctagcgagggggaaaccagagttcaacagcatcaagggtcctgccaggaggcctgaatctgggcctggtggttctggttcaggtaggctgccccaggacagagctggaaaggggtccgggagtgatctggtttaggggatggtaaggatgggaacaagtctgaggttctggtcagtcccctgaggttgccctgtggacctctagtttccaggagcttttttgaatctctacccagagtgaggaagacaggaaatcatggggtgagggggacaaaagctaggccaggcccaagaggacacggaggccccggggaacctggtcagtaccaggatgtgcaggcgattagaaagcgcacatcatccagtagtccccatggtccgggctcaggctgaggctgctgcggaccctctggcgctggaggctggggctgcgcgggctctgggccttcctggccaccactcaggagagcgcccatggtctgtaacagaagcccatcaggcaccaggccaggtgacaccccacccaccaccaacacccttccccgccctcacctcaggcagcgaagtgaaagcggatctatcggcagcttggcccgagaggagcggcgttatgacgcagtcccggataacccttcgcacgccaggggcgggcccacggagctcaggagaggttgggcgactggccagccccgcccaggccccgccccacagcatggccgttggagccaacgacagggggcggcctggtctccaaagtcagacagggatgtaacacactgaagctgtgtgcctgtggcttcacagtgcgttcgcccggcagggagaatactagtgattctcattctgaggccggggaaagcagaggcagaaagaagatgggttaaaatgtaatccgggagggcatcactacttccccttgctcatcttttcttagatggagtttcactacgcatacctggttgacccagaactccccaggcctctgggattaaaagtgtgccccatcccaccctcaggtctcctatcttagtgagggaaagcactgcatgtcaatcccacccgacttccccaagaccccaggaagtgccggggaaaggtgttgcaaaccgaggatgaacaaacagcacactgagcatggggggaggcagtactttaatggggtgggacacaagacagcagaactctcatccaggagccacaactcaaagccagcatgacacggcaagcctttttataacaatagtctagagatggcacggatgaagaagggttgggcgcgctcaaccattcagctctggtaagctctctgccacgccctgctgccagcgtttggtacatactagctcaggcatggtaaatgagccaaagtccagagccaggagcccacacagcagcatggaaggtgactcatgtgaggctgcagagagaaaatcgtattatcagtagctgttttacagggtacatgctgccccacccttagacctgttctagttcagtcattgaaaagccatacttgtccccaccaaggttccagatttaactaaatcctgtatatcaaggtctagcctaaaattctgcatatttgaaaagtaaaatcaattctttcctcattgggccacctttttccaatttattcagttaatgatcataaccttgagctctgaacataagagatagaagcaaggaaggttggtgagaacaacatgtgcttagaccagtctctcagaggccaggctgaggccaaagctttggtctcttttccagaactccctattacagctgatgcaaaggccacaaatactagactggaaaacagatctgctctacaaggattaagtgaaatctctcttattggaggtggcaatcattgtctgataatgagactggaatgcttattgtgtatgcaggcatgtacagaggttgatgtcatgtgtctttctcagttgcttctccaatttatgttttgagacagggtttctcactgaacctggagctcatctcttctgctagactgactggccagtgagccccagcattgtagttacagacatgtggcacacagcctagcttttatgtgggtgctgggaatactgcttgcacagcaaggactttacccattcactataataccttcccatgccaatttggcatcttcattgcgaagtcttatgggcacctaaaaacatgtccaaaaaccaaagaaaacggactagtcaagtttcccttcctttccaatacccttttctttctattgtctaacagcacagacaaggactaccagggacacaatgacaagtggctagcagttctgcttaactttaatacagtttctataattgacaatatttttctgataggtatcaattattaggctatagaaacttcttttcaattgttactaagaagcttttgtctttaatgattgtcactgtctccttacaaaagtctacgttccaaacaaaagacagggcgtgttctgatcccataaataccgtctggcacgtaaaacgctgctgaacaacttctcaggctgggtgtagctcaacagtacagcatttgcctagtgtgcataaactctcaattgttcaccagctctgacagcaaagttagtcagagtgaataaatgtcctcctcagaatttctcaaagtagcttatttaaaaacacatgcacatagccaggtgtggtggcacacatctctggccacagcacatcaccagcctgcattgaaggacactatctttaaaagaactcaacagtgctggactgtattccacctacagtcagaacctctgagagatcacactaagaatccacataaacaagcaacccaactttcactaaagctcaaaatctcaggctcttactgatactggaatttaaagcccttagcctcaggaaaacatttatccttcacatatcagtattttcccatctctctaatctgtgtgaggttcttcctcactctcttctccatatttagcatctcctcatcacctgaaacagactaaatatcactcatgaaacttctataatcccagaaatttccccaccagtttcacaagctgcccatatggggacagttaaggaactttgtttctcctttaatggctaaaagttacacatagcaactctatctcccatgcacacagtgaacccctccggatatagaactacactctctgattacccccatgcagcctcatccatgggcatcagtgcaagcaaaggcaacaggataaagggaaagtccttccatggtaagtaaaggatctatttacttgtcacttttgggtttctatcttcatagaggtgtacctggctttggcaagcattaagaaaggtccctggcagactgacagaaaggaggccaaactacccagcatttgctcctgctgctcttccagagaaacgtcaagtctcagtccagtctctcaagtgatgagagtgagcaaacatgcccagcccagctggctgtgtaatccacagaagtctagaccagtggttcccaacctccctaatgccattaccctctaataatctctatgtggtagtgaccccccaaccataaaattatttgttactatttcagaaatgtaattttgctactgttatgaatcataatgtaactacatgatatgcaagatatctgacacacaatcctaggaaaggatcattcaacctccaaagcgattgagacccacaagttaagaacctctggtctggcctggagagttggctcagaggttaagagcactggctgctcttccagaggacctgggttcaagtgccagcaaccacatggttgctcacaaccatatataatgacagctaggtggtgatggtgtgagcctttaataccaatacttgggaggcagaggcaggtgaatctcagtgagttcaaggccagcctggtctacagagagagttctaggacagccaggactcttacacagagaagccctatctcaaaaaacagcaacaacaacaaaaaacccaaacaaacaaacaaacaaaaaaaccaaccccctccaaaaaaaaaaaaaaaaaaaaaaaccccccccccccaaaaacatcttgtaatcccacaatttagctgctttaaaccatgatttcaatacaaaatacatctgcagcctacttttaagagcacccttagcaatctgaggccgtctcagtgattaagaggagccttctcaccttccccagccaactgatcttttctatctcatggcttagaccattagctaaagacagtggacacaggcaacacaaactgcaaaacacagccagtgatcaagtgagatgggtcacaggaaaggtctgccttgaaagcccagtctccaaggaagactgagtgtgagcagatgacagaggacatctgtggctctaagttggtatgcactttcactctcacatctggggaaaacaaacacaacatggctttctttaaggatacatcttcttactctcctctcaaagacaaagtgagccgggcatagtggcatatgcctttaatcctagcacttgggaggcaggggcagtgtggacctctgagttcctggccagcctgacctacagagcaagttccaggacagccagggttacacagaaaaaccctatcttgaaaaacaaaaaacaaagaaggcaaagttacctgtcaatgagggaatcccgcatgctggtggcaatagtgctaggcttggcctcgtttagcttgaagacgctctccaccactgacagctctgtgctggttgtgtccagaccacagaaagcacaccaatcgttcactaccattccagcagcaatcacctcgctccctcggttcacagtgcctgcctgcagaggtgtgagctcaacataagtcacagaaccaaaagcaaattctctcacctcaagtgaggactcttctcctgaagtctgttctatgtctcagggccccagtcccaaattaaggaaggtaatgacccagattcccaaggactgacataagggattgcatctagtagacaggggtcagaagacaggaaagcttaccaccaggggaacctgaagaagggaggacagctcgtcctggtcctcgatggaagtcttagggtgcaccagacccccttgattactgaagacacagtagcttcctactaacacctggtcagcaactgtctgtctgaagacctccaccttgagcacgtcagccaggatttcttctgtttcctgttggacaaaggtactgtgcccaggatccagaacatgtagggcaaatacccaggagttctctcagcaagccagacctggttccctgagtccctttttactaaacatctgcgcatggaagcctcactgagcaagacatgggtatggctaagagtctagactcagcctgaagcccctaaaacctaagcaagccctgaaaaacatgactcttggctccatgtcacccttttcactaatacataccctattcaactgtcaaccaactatcatggcccatggcccaagactgaataggccaatctccccaaccctgaaggattaatgccctacccagcttgatactgacacacaaaagccttagtattcctaggaaagtaagagtgctgagataactaagaaaatacacaaataaaacccttaattcctgccatgggggaataatggctaactactagctaggctagtcctgtaacttccagaccaaactgccacctcaccctgtccaagtctgggtggactaaggccacatagtcattgcaggtggtaacattgccaagggctgagagccgctcctccacccgccgtatctgcaccgaatctggaaggctgtttcggatatgctgcagctcctggtccgtggtgttgttgggtactagtagcccatgcctgttccctggaaagaacacaattgtaaggtgggataaagataaaccatgaacataggaaatgcttcctgggatatctcccattctagcccaattagctttcctaggagagctcaaagctgaagccccaacctacagatccatatacgaaccatgggtccctagacaggcctcagatggccaggaatctattccaacaaacatcaccatcttatcattattaactgggggttggggggaggtcaggactagcaaggaaggcacttggcattacttttttttttttttaacattacacacctacctgaacagctaaaattttcaaagatcatcaagtaatagcaatagtataaggaacaactgaaactatgctctgacaggagcatacaatggctgtctactccagataattactgtcatcatctaccacactaaattcccacataccctcataggtattatatatcctaaagaatatttgtacatatgttcatatttacagagtaactattcctaaaacaccaaactaaaaattgtctacctgttatcattataaaaccttctgtccaggcttaggagccacagttttaaacttcaaattactttcattgaaagagagcaaagaccaggctaagatctcccttatcacgacagaatttgattcatatcctaagagcatggttaaaggtcaggatttttatttctaaagatcagagtactgaagtaaatgactatgtagagtcaccattcatgtttaacgcttaaaaaaagttttaaggtaaatacataaaggaggtcaggacaaccccaacatgcagattccccccccccaaaaaaaagtgtcagcaatgaaacatgatggcacacacatgctaatcccaaaacttgggaagtggatgcagaagtatcaggagttccaggccatttctagctacagggacagtgtggctgaggcgaacatggaaggatcaaaaaacaaacaaaactaaaagttggaggctgttcaaaagtgcttacaggtcaaagtgcaagggtgccattcaagagatgtatttagagaatgtaagatgtaaatgtagctgaagtatgacctgggaaccttagttattgcgatgaggcagaaattaatgctcaaaaacatgaagcaacttgtccataatcagaggcaggaaagagatgagattcactatctaggagtggaacttggtgagtcacatagttctcaagtgtcagtttcttcaaacagtcaaaggagggcaacccctccttccagcatcgctgtggaggaaaaacgcgaccaagagtgaaggcacttaatgctactactttgctatgactattctcgggaagtctgggctacagtgttcttgatctgcagtgagactgagtcccacccacccctgagagattccagcgtccaccgagaccgcaagcctggagatccccgggtcactggggtaagctccaggagttaatgattgagattcatagcgctccgaggcttcactcgtccctcggcgtcaaccccccgccttacccacacacatgcgcccgatgatccggcagccggcgatggatgcatgcaccacggggatggtttcagagagctcgccctcgaacacactggagaaacatggggtcgctggttactgctggggtccctccctctgccggacctgtcgctcccggcatcccttccctcccctccccttcccgcccccaggagccccggcctcacctgtagaagttctctgaccctccgatagccaccaggcagtaggtgttggtgagcttggcaaagcagccgacctcgcagttgttctcgaacgacgctctgaccgccatggaagcctgggggctgcgcgaccgcagggtctgggacgacagaccctctcaggagccggtcaacccacctcgctccctcagaccccgccctctcggacctctcaggcctcgggtcgcgcccaccgcatccctccaggctctcctgccccaaaccctcccgccccggggcccggaaccgagcctcgccgccccgcgtcccactaactcaccaaacgactccaatccccacacgctgcaacaacttctcccgtaactagctttccgtttccgcctcctcccagcgggcttccgggagcacgcgggagcccagccaagcatgcggcctctctaaccccaccccttcggaggactctatggttgctcgtggtttggcttggctccgcccacccccgcctcccgatggttgtctggctttcgtggtgtcttctctccctattgggtctttttaggagtaatcagccagatctgaggctgagcagacgagaacctcgagggaaagagggaaccggtgtcgtctggctgaggatggattgatgagggatgtgtttaccgagtgaggccggagaaggggcaggtttgggaaaggagaggatcccaccctgaccgtgcggacggaaatacggatccgaagcagaggcgagaggcccgggctgaggattggggctaggctcactcaggagagtggccagtatggagaaacgggagcaggacagagtggttggaggaggcacgccgagagccataagaaacaggctgaagaagatattggagagaggaaatgtgtgaagcttggggagactggagaaagggtctagggtgggcaaagatgtgagttctgacttgcttccttgatgtgttcttacacacataccacacacacacacacacacacacacacacacacacacaagcagccaccatctgtcctggggatagtggtgtggcccattttcataagcagaataaatttggctgagggtgcctcagaatgccacagcaaagaaggaagaagctaagaacctcagatcttctttatgcctttcattcttctccaaggaatcctattagtctgaaaagggcctgaatgttgcccttatccccccccccccatcttgtaatcccacaatttagaacacatcaggttgctacttgctctaaccatatctgcctttattgatttgtaccatgccctgtctcgggcaagcggtgagttcaagagaaaggcccctgaccagctgcagcctgcgcttcaagagacactcagcaagtggcttgtgtatgtgcgtctacgtgtccatccacatgttctgctcatcttccccgtttcaccccagactcgctcgtttccatctaactctaccaacaattctaactctcttccccgtctgcctctgtcgacaaccccatcctccaggacctgcttgtaagtccgcttctctctgatagactttcctggtcacgccaccatctccgtgaccctccgtccctagtacactttccatttgatacagctctgccttgttttcctcggtttatgcatctaagcagtcttgcagctccgtggcatgttcagggcagggctttataagcagagttgggatggagttaatatgtgtacttacagcttgtgaatctcgagggggttctgcagtgtgtactaaatgcacgtattttctgtggccattcatttaggcagacaagactaagtacctacaactaaagttctgtttgagttaatcacatagagctatgtgtactcactgtatgcatctatgggtgtacctagtcactgttctgtgtctactgtatgggcactggggcatccttgtagtgtctgtatggtatgtacatagtgactgcaggaactgcagatactgtgttttgggtctttgcaaacaaaacacatgcttaaagccaggggccactgagctggcagagttccctaccctgtcatttactcagatctgcttccaaattaaccatgcaaactctggacttcagctcccgtacttatagaatgggaagaatatcctccagactctttggcctctgtggcagacagaacatgaggaaagaaacgtcatcctttggaaggcatgataataagatgcacacactgtgccatcactgtggctcttaggcctaccaccttcagaggtcgacctgtgatgactgtggcttcattgccaaatgcaagagaaagtaaccagagtgccaaggaaaaaagatgaaacactcctgggactaggtggatgaggcacctaaaaattgtctatttcagattcagacatgggttctggaaaaaaaaaaaagaaaagaaaagaaaaacaaacccaacaacatggaaacccaagagggcagctgttgcagcatccagttattcttgagatttcaatcagccataaaataaatgttctggtttcaaaaacaaaacaaaccaggggtggaaacttaatatagctacatgccaacaagagatccatctagaggatacagagaatgagaataaccggtgtgcagtgcccagccccagtgacatacagaaaacactcagtaactctgggttctgtttgtatgtatgcctgtgcgtgtgtgtatgtataagtcttgagcccagagagtatctgatctgagccactagatgcctcccttccttatgcagcccagctttatactctcatactacagtcttgaacctgaatatgtcacctatctgtggatggaggaaggctctgcccctgctaggagcagagttaggactcaaaacgacttcggagctgcttgaatttggacttgttgtacttagtgatgaggtccagtttgctgtggcccaaggtcagccgtttctcaggtgcaaataggtcattgctattactattttgatggccacttatgggagctcccgggaggcctggctcaggtctctgcctggcaccctgtagttgatgatacttggtgatgaggtccagtttgctgtggcccagagtcagccgcttctcatctgcagaccctactccggccatgcgaactgggtttggttctgggagaccattgggtccaggcccctcactccggaatgggccaaatttggtgatgaggtccagctgactgtggcctagagtctgccgtcgttcatctagacttggcttgtcaggcctggctgaagaattggcatcaggcagtattttagagggctgggccttggggttttgtggcaggagatccaattggccatggctgtggtttaagggcagcttcctgtcctctagacccagatcaccaggtcttagggagcctgactcaaggacaccctgaccctgggacaggagatccagctggctgtagctgtggctcagggacaatctcctatcatctagggcctgctcaccatgctgaagggaacctgaattgggggtaactctggaattggaacctcctgcttctcctgctttagggaaggggacaattcgatccaggtgatcatgactctggctcagagataccttcttctcatccactgtctccagagctgtgccaggtacccagcgacctcgtggaaggatgggctcttgacttgctgggagcccattctctggaagccgggacaatgctgggactcccctagtgaagtggagaagggggcgggaacatgggagcagaggtgaccccactgccagggtcaagggactggcactacagtggttaagggcaggagaggactgggaccatggagatgcccccagcttgctcaggttggccctgtagggtccaggagttgagctatggttaggatctgaaagctgacggtacagggatggtgggctaccagcttcatggtgggcaggacctggggacaaggaccccatcaccatgtcactgcagccaccaccccctggcagagcgagataggaggaacggcccagaaaaggtgaatgcttgatactgccgaggctgttactggagggtgaagagcccgtagcacttggaattccaggtccaaaggccagggtcacaggaggaggacgaggtacccgggaagacagtgggtcctcattgccacagaagccttccacaggctgtgactcggcatacagacatcggaactcccggtcaaagtcttccacaatgtggcccctcagctgcagcaccatgctggtgtgagcctggctgcaaagccaggtgaagctggggacagagagccagagtcagggtcaagggtgagggtgtccaaagtcgtcctatttcccatgtgcaggagttactttctatgccaaggcagtaagtagaatgcgccccatctgccccttgccctgcctggtccctagcacacagcaggtgcctaggacatgtttgaagggatggatggaagaaattcaaagcgggcagatatgagatgcccttactaggtcatggcgcagccccccaggcctccctccttttaatcatctcacctgtaactgcctgccaccacctgctcacagtcaatgatgacaaacttctccagggcctgcccggtgaatcgtctacccgccttgctgcagtacgtgtctccgcatgtgctccgcacacgcatattctgggccaagagcagaagaagattgatggaaggaggatgaccttaaggaggcagagctcaggctggagagaccactcagtagttaagagcactctctgagaggacttgagttctagtcccagctttttctgtgaggtggctcacggctacctatgactccctcacaagggcagtctgacaccctatgttggtgcactcacacacacactcataatttaaaataaaatacactgaaaaaaaaaaacaaaaaagaaatggcactcaggctgtctctgacctaaggggtatctggtcccacacagttaaaaggaactatgtgttccactcccactgaccaacctccatgctcactgaccgccagctggccctcttacactcccgattccccttcttcccatggtggaagctgtctgcccatactgaccaccagatgccccccattgaggtccatcttataacacatctccaggaagtacttcaggtgctcctgagccaggaggaggtagacagggacaccacggcggctggaggcctccatgaggtcacacagaagctccatgtcagtgaatacgtccatcaccacagccaccacctgaaggagacaggggaagttcagccccagtcaaagtatggggttgaaagccaggatgcaaaaccagaatcaaattctatattttatttttggacagggtctcattctgtaacccagtaatccaagctggccttgagctcactctgatctgagccccatgatcactgggattagaggagtgtgtcaccatgcctgccttaacctggagttcttagcttgggcactgggagaactgacagtcttgaaccactgattgtttaaaagcctttgaggaatttttctatggacagcctaacagattctcaaagacatctctagatcaactatgttagtctaaagctctgctctttggaaagctggagaagtcaggagtcagaagcagaccccagcttccaggctgattcccattattggtaccagctctgctctggtctagggacttccccagtctcttctacaagggagaaagcttcaatccagtgctgggaatttctgtgtgtttttgttttgtttttcccccaaacctcagttgctttggaaactgcagagatctggtgtaataacctatatttacagcctcctttacttccgtctgtgctaagtggatccaagcttcccgctcacttgaggggctgaggcgtgtgcctccaacacacagggcattccttaagcccgcagcggccccttcttcccgctgtgtgtgtgtgtctactgagagcaggagggacagagtctactattgcaacttggagccaaaaggaagtgggttcaaatccatattcctctacttcttagaagcagagtcttgggctcatctagcgagcctcagcttccttgtctgctaaatggagtgtatctcgtagttacaagggataaatgtgaaaacgctggactagacacaccaaagaagctcaatagccacgcctcccccctttcctgctaccttcttagcaaatagagaacactgggctatgggaaaagaaaacacttctgaggtcactctgggaatgagtggcagctcagcccagtagcctgactcttagcccaagggcagaaaagtctaattggaggtgagcaggcggggttcgggggattctccagtatgcaacacaggtctggccagtgttgggggagcaggcacgaaagatcaaagggggacagtgatgacaacagcaacaacctcgctaattatcccattctggatgccaatcaagctctgccctcctgtgcctagggcagaggcaagcttgctagcaaggctttggaggtgctggtgggatcctctctgcagcaggagtctacccctatctcaaaccctgccaggggtttcatatctattccctcatctgagaaggagccaaggctccaccagtgaagctatgctgctttgagactaggggcttcccaggtgtgactgccccttcctaatgtctccaagctcagtggcttccactcttcagtcctcctagcaccaaactaagagctttgcctatgccaaaacccatgtgcagtgcccacagccttgcttcaaccccagctgttggtgcagcacaggggattgataggcagcgggggacggggggggggataaactgagccatgctgggttagaggcagagacctctccctcccagacccagacaacctctctaggtaacttccttctagcccctctctgacctcaacttctttctaagtcaaggttgtagctcagatgttcaccatggttgagttcttagtctggggtgggggtggggggcataaaactttttgagggtctgggaaacaggtcagaagttaagaacaagcactgtgctcttccagaggacccaggttctattccctgcacatttggtagctcacaacagtatggagttctaattgcaggggattcaaagccctcctctggccgtcaatgactccagacatgttcatggtgcacacatgcaggcatgcaaaactctcatgaacatgaaataaatacaagtcttaaaccaggcagtggtggtgcacacctttaatcccagcactcaagaggcagaggcaggcagatctctgtgagttcaagggcagcctggtctacagatctagttccaggacagccagagctgttccacagaaaaactctgtctctaaaataaataaataataaataaacaaataaattttaaacaaaaaaattttttttgagaatctgatcaaggttatagactccctcccaaggtagataaggaaccctcccaataatttcccatgcacttccaggggtgaagttccagagccctatgccctgttctttgcttaattaatgttcctgagtgccaacagaaaataaagtgcccacccatcctctgacagctggggatctagcagaggtcaaagactctagtcccggtgtccctgttaagcttctgtgtggcacaaactggtccccttcccgtgagccacgtctgtgaagtgaatgaagaggtgaggcccttaccgtgtgggcctggctgaagaggaatcgcagcaggtccttgatgctcttgcccttgtccctctggaaatgaaccaccgcctgggtggggctgaaacctgtggcctgtggcacttcaggccagcccaggtccaggtctgggggatctaagtcagaagccatggggaagtaggtgcctgaggtaacttcagagagcatgctgaggcggtcatgccctacggtctctggtccctgggcctcgttgagctcgggaaccccacgcacatggccgaccatgtagtccacatccagggcactcaggaagggcaattcccgctcttcagagatgacctgaaggtaggcagcctcgcccctctccaggagggcgtccgtagcaagccttgcagcctcgctgtgctggagcaccaggggggagctctccctccaccaaggccgctttagctcctccactcggctccgcaggggtcctgccatgccctgggtccctccagacgctaagctgctggatgtgtgcatccacctagtgccctacccacctgaagctccatggcttgcacctgggttggcgactgtaggaagaagatactacctccagcttgccagcccggtgtgtatggcagggcccccaaagtgttgccaccctaagtctgaaccaggctccgccccattgcccctggccttgggaacctgtcaggtcagccccacctgtctgtctgctgttgggactcgcctgctcagggaagtggcagcgccaggcccttaaagcatgctactggctcttctccagacactccttacaggggttacagccacaagcctgcaacccctgaccctcgaaaccagcagaaattagcgctccctccctccctccctccctcccagcctacacacggtggggggtgggggggtgttcagggacacacaattcacacaaacacacacacatacctggtagatgaatgattcaagacacacaagcagatcctctaacacacagactactgaccagcatgcagatgtagactataggttcatacatgcatttgaccaaatacatgtaaatgcccaacactaacatagagactggccattactccaaacataccaccataggtactgtgtatgtcttggtccacaaacatattagacccccaatatgggttgaacgaggtataagaactctaggaacatcaacactgtctcccgctgggcctctgccataaccacggtgctgccataaccatggtgctcacaacaacctcaacccaattctgagcccatcctccaaggacctgcattaggagtcctcactctgactcccaagaagagttaaaatacccaccttccatgctccacccatgctgaatattccagaagttctgaaactctagcagagagtccagagcttgccttttttttctattttattaatactattttttaattgtcacatagtcattgtacatagtactgggttttgtaaagatgttttcatttaagttggagtgtgtcttttttgttaagacagagtcttgggcctgatatgttggctcagaggttaaaaacacttgctactcttgcagaaggctagcgctcatttcccagcacccacgtagtagctcacgaccatctgtaactccctgtttcaggaggtctagcatcttctgatgacctctgtgggaaacaagcatgcagatatgctggcaaaacacatataaaataaaaagacagtctcatgtagccgaggctagtcttgaactcactgtgtagccaaggatgaccatggacttacggtccactggcctccacctccccagtgctgggattacagcatgcatcatcatgcccagtttatgcagtgctgaggttctaacccagggcttcattagacaaacactatacccactaaacctcatcagcaaccatgcttggaacttgcctttttagccagtgttttaatggcagtgcctatgcatcaagagtggtgggctagccgggcgttggtggcacacgcctttaatcccagcactcgggaggcagaggcagaggcaggtggatctctgtgagttcgaggccagcctggtctccagagcgagtgccaggataggctccaaagctacacagagaaaccctgtctcgaaacccccccccccaaaaaaaaagagtggtgagctgccaggcagtggtagtgcacgcctttaatcccagcactcaggaggcagaggcaggtggatctctgtgagttgagacaagcctggtctacaagagctacttccaaagccacagagaaaccctgtctgagtggggggaaaaacaatggtgggctaaggtagacggctgcatatccacacactgagctccagggatgcacgcagcctggtgggaaccaggctccatccattggggctgagtttcagagaatgggcagacacacagcaagatcagaacggaaacagagcaggttctgcctcgacgagagtcacagttcatggttctggaactggtggggctgtcctcagaggacggagaagcggttttgctctgaagaagggtcatcagttggcaactgcacgtggtggcagaatgtgggggggggcggatatttatcaccctcctgtagaggggtgagatctgatgatggtgtcaggaaatcagggtccctaaagccttatcgtatatacccagtccgatatgactgaattgggttcatctgttctatggtcagatctagagcacaggctcctctgaaagagaactcagggtggagagggagggatggaaagtctaggtaggttatggggcagaggggtacggggtccagggtgtagggagccattgtctaggacctgaaatgcttccatgtcatcccaggtgccagcacagaaaccagagagaaaccaaagcgtggggtcctctaagggggcccttccctgggggtttgataggctaccagagtgttaagaagctgagtaaacaaagtcagagcatgggagggtgataagctgcgggggcaggaagagtgtgagagccctcattaggaccttatctctagattggtttgaggggagacttgttcaggcctcccagaggcaggcaggttggtgagctgctgagttcactgtttatctctggcacatagttttagtgctgtatcttgtttaccacttttaaaattatttgtgttggtttgtttattgtgtgggtgagtgcacaccacagaacacaggtgaagtccagaggacaactttcaggagctggttctcgccttctaccacgtggatcctgggatgactggactcaggtcatcaggtctggaagcaaggcaccttcacctgctgagccatctcactgactccctgttttctacttttgtgttaaaaatacacatagaatttaccctctccatcattgcacctcagtggctttaaatacacccattgctacatccacctcagagctcaccattttgcaagcctaagagtctatccacaagcaacacttccctttctccccttccactgagcccttgcagccgccactctacttttggtctccatgaactgccccagggaactcttttaggagaatcaaggtgcatgtgtcttccttcaaacagcttcttttcacttagcacagtgctttcgtttcagccatgatgtagtatgcaggttgaatgtgtatcatgagtgaacacacactcattcactgctggataatctggttgtttatacctttgattttgagacaggtctcaagtagcccaggctggcctcaaaactatgtatcctcagatgagacttccattcctgaacctcctgcctctgctccccaagttctgggatcacaggcatacatcaccatgcctagctagattccttttttgtaagatttaaaaaaaattactgaatgctggccatttcctatcatttaaatgagaatatattcatatgcatgcagagatggacctgtttatgactgtatgtgtgcacactgtgggcttgcgtgtttgtcttgaaatgcatgctggtatgtgtacctacttgtgcatgtctctgtgaagatttgtttggttactgagtgtctgggtaagtggggtagcccttgacaacaattttgtactatgtggcttgttttcattgttgttgttgttgttgtgtgcagcttagtgcaaagggcagggtgagagggtgaggcgaaaggaaaagggtcccaagcacccctgacactctgataataatatggtacaacaaacctatgtccccaaggcagtaagacagctgctcctccctttgtcctgagtgggtaaagggcaacaggagggtagacgggtggatactggccttgggctgggccttgaggtgctggccttgggtgctggaagccactgggcagactgaagctcagcccgtggctgcaatgtgtgtgtggcacagaccccttaatgactgttattaggaggaacaaaaatattttcctgtccagagggagtgtccggcgccttcctggcaacgcttagccttcccgggggccatttagtcttgtctgtcatctatctcaagctgagtggcgcctgggcaggtgcctgtcctatgggggtgggacagatgctagctatagtctttcaatggcaggatgttcaggtgttagcactgccgcacacagtctctgtggtacttctgggtcaggggagacaggattctggaggaggggcagtcagagtgcacctgatactttaagccaaggcaaagaagcttgaagagctggagagcctaggaggacaatgcggacgagtcctggaggctggctggagctggatagtaaggatgaagaggattctgtcaggtgtagtgtagcatagcggcatacaccttcaatcccagcacttgggaggcagaggcaggtggaattctgggtttgaggccagcctggtctaatgggcgagttccaggatgctgagggctacacagagaaatgctgtctcaaaaaagtcaaataataataataataatggtaacaacaacaacgtagtagtccaagcactcaggaggctaagtcaagcaggctgaaattgaggtcagctgcactacacagcaacaccatgtctcaaagagtcaaacaaacaaacaaacaaacaaacaaatcctggagtggtggtgcacgcctttactcctaccacttgggaggccgaggcagggagatctctgcgttcaagtctgcttggtttacatagtgagttccatgtcagttacaagctggccagggctacatagtgagactctatctcaaaaacaaacaagcagacttagaaatatacacccagccaatgcagagtggcaagcagggcattccaggctggaggaagaagaaggccaggatgtcctggaaggaaggtagagtctgaggagcctagcaggggactgcaggaaaggacacagagacacaccgtgaagacccttgggggcatttcaggggaagttgggaagattcaagagccaagtcttaggatgcttaggaagtcacccagtgtgtaagagtggcccgaagcagcccagttaagtgtgacttgttcactgagtgccacatgggtctccagaaggtcactgcctttcctgttgtcccatcctgaaacccccaggggctgagacccagggctagcctaccatcagaggccatagttgtgccactgaagtgagtcagatcccctggttgggacaatggttctgcctcttaatgggtgaggtcaccttctgagtcacaggcaataaatctgtaaaatgaggctagtggcacatctttcattgagaggttgtagggaataaatcggtgacaactgcctgaccaagtggtcatatcctctcagtacctgctgaattccagagcctctcaggctacgggagcaaggagtcatgtgtaggtatgacgagagatgaatagcaggggccagaagatcttctagtcagtctcttatagatccaagactggccctgaaggccaagatggctgccagccatgtcagtggagtgtgactggtaacccaccagtgcttccaggatttggctatcataggaggcaagatcatcaagatcatccctcctctgcacacgtgtgtacatacgagtattcacatacttctccagcatgctggacattttggcttttttttttttttttttctaaaatggannnnnnnnnnnnnnnnnnnnnnnnnnnnnnnnnnnnnnnnnnnccatccatccatccatccatccatccatccatccatccatccatccatccatccatccatccatccatccatccatccatccatccatccatccatccatccatccatccatccatccatccatccatccatccatccatccatccatccatccatccatccatccatccatccatccatccatccatccgatcccgtagaacagtgggagacatgccctcattcatgtttccgtaagaagaagggagggaattccactccactctgtagaaggagacatctgagagagccatcatccctcttcagcacccttacagtgtcgtcctcttcttccaaaaaagaggagtgggcttgtgtggcgatggcttggggaggagctggcctcggtcttttttgattccttctcattctcttcctccttctcccccttccctgccttggggggaattagcatgttctgtatatatctactcagtataagcctctactaggaggaagtccaccccgtcctggaagagcaggatgtctagttctgtggcaatgttaggaagtctgttggatgctctgtcagcagctttatctgcgatactagtaaagccaccattttaatgttcatctgtctggtgtcttatttcccatccattctgaacttgagaggggaagaaacattatcttctgggcctttcaggcccctgttacggttacctcttcctgcccacccctttccttttccctcgggccagtctccccaacatggatttagtgtctactttcagatactagtgggtggggggttcccgaagatgagtaagagcttgtgtctgctctggtaaagctcactgttgggtgaggaagatagactcataaataattataaactgcggattaaaccaaggaataaaccaggtgcttggggcttagcaccacgatccactctggagctccagagaaagcaggctctctgtggcatctctccctattttcccctccacattctggaaaggggcttttgatctggacagattctgggtcctaggctcaccgacaatggctcagagaggtgtccagaaagcctctgctgggtggttagtacaagggcaggtgtgactagggacaaccatggctatggtttgaggtctgctcttccggcctctaagagcaaatgctgtatggcataggcaaggcatgatgggcacagtggggtgggggaggctggtggtgggcagggacagggaggcaggggcaggagtgctactcccaagggaagagccaaaatcatttgcagctgtctcatttcttcccagtaaatccattaactctcttcctgactacttccaaatagtgcacaaactaggtttcctgggcatcactaacagccagtctcctcctagcttctctcttcaggaatcccttgtctcccttctgtccttgcaatctttggtctcaagaaagggtgcaagccggatgtggtggtgcatataatttgtcccagaatacagaaggcagaagcaggtggatctctgtgagttcaaggtcagcctcatccacatagcaaatccaaggcatcctgtgtcgtggaaaattattttaaggtgtgttacatttgtttgtgctgtagaacatttttttttttactgatgcaaagatgtgttacttttgtttatgtcgcatttgtttaactctgtgaagctgtgttattttgcctttctaaaacagttaaataaattttctaagagatctgaatggccaatatcgaggcaggagaaaggataggtggggctggcaggcagagagaataaataggaggagaaatctgagaaagaaacaagaaaaggagggaggagcaagagatcaagaagtgagaacacaaggggccagccatccaaccagacatggaagatggaaagataaggtagacagaaatagagaaaggaaaaagtccagaggcaaaaggtagacaagataagttaagggaagctggctagaacttagccaaaccaaggctaggcatttttaagtaaaaataagcctgtgtgtgatttatttgggtgctgggtggaaggcccccaaagagtaagaaaaaggagtgaaaaacatcaactgcagtcctggactacacagtgaaaccttgctgataggcggggtggggtgggctagagaggccttactgattaggagcactcgctgctctttcagaggactcggattccttgtagtaccttcgtgatggctcacgaccgtctgtaactccagttccaggagatcaaacaccttcttctggcttcttccaggactaggcacacatgtggtacacagacatacatacaggcaaaggccccggccatgattctctctatcacacctgtcctaggggactttactgaaccactgttggtgagcccagcacccagcatctgccagaactcaccttgaactcatacacataaaaacaaacaaaaaacatttttttaaagaaaggattcttcccacctctacagggccaggtcttgttttcgaagccggacttcaatttttgagagggattaatgacagcaagtccctaacattccagggaaatccttactattcccacctctccaaagactccaaaccatgttcgtatgcactgctgttacctcttgcaatctgcattctctcagcagtcagccatgttcctagaacatctgaaacccctaaacctcccagcttactctcaggtcccatgttgcagcaggccacgtggggagtccttccagaagctctccccctcctcagcttctctccagaccctgcctccagtgcccattcttgctcttcctaacacctcttctgagggctgctaccaccctgccctggtcctcaccctactttacctgtgggaactcattcactttcattacatgtcctctccatacccaagatggactcagcatcctcatacacttttttgtgttgtttttttgagacagggtattattatgtagctttggctgtcctggaactcactctgtagaccaggctgagctcaaactcagtgctggaattaaaggtatgcaccactactgcccgggtaatgctttaacttttaaatatgtaggtgtgtgtgtgtgtgtgtgtgtgtgtgtgtgtgtgtgtgtgtgtgtgtgtgtatgcgcaccacgtgtgtacaagtgttctcataggtcagaagatggcaccaagttcctcggagcaggatttagctgcccaatgtagatgctgggagctaaccttgggtcctctgaaagagcagtcagtgctcttaactgtctggccccttctgtgtgtctgtgtgtgttttttgtttgagccagggtttctctatatagctctggctgacctggaattctctatgtagaccaggctagcctcaaacttcacagatgcatctgcctgtctgccttttgagtgctgggacctaaagatgtgcaccgccacacctggctcttcggttagctatagcacagatgcagcttcatctacaactctccagaactaaagcagatggctggagtgtcagtcacatgagcctgtcctcgggataaacctgggccttttcaagcttccatttccctcagctgtagcacgagctgacacctctcagggcttcggatgagatttaaatgaaataataggtgaaaagaggtgacagatgtgtctgtcacagggcagaatcaaatatcagttatttaaaaattttatcgtccacatcattgctcaatgtttctcattcgaaaacctctagggaaaatgctgtcttctgatgcactcacaagagacgttttcctgtgacagaggggtgacagcttgaggcagtctctttcctcactttggctaagttttatactcaattgcagatctccatgctgacctgagggaggcagtgtggtctagggagagggttaggtgctgcagccccatggtctgaggtggagccatcttgggtaactctctaggccacctgagccttaagcctcttcattgtggtcagtaaaaatactgaggatgatgtctgtcatatgggcctggtgagagtgcacttactttcataaataaaaaaacaaaacaaacagaccacgtgagagttggtgatgagcagtccaggcatgggagtggcagggtcttgtgataccacgaagactgcctgccccagcttgttatcctcctgcctcaacctcccaaatattccaaacatgatttcatgtttgtagtgtattttggtcgttctcaagcattactctctctcaccccctcctacttgcaccaaaccttctttctgacaagtatcccctgccccctattttcatgacttttgtttctttgcgacccagtgagttgagttaggtttgcctgcatgagcctgggtgtggagttatttagtggggcatggacaacttaccagcagctacactgctaaagaaatgtttcctccccccaaaccataacttctcaggaaggggctgggcctgaaaagctcctcctccatccacgatggggagtttctgggcccccgcttgttcaggtaaccgcagatgctgagtccagagtgcaatggctaggccatgtctagaagacagcagtcctcccatcctccagctcttctggcccctcttccgcgatattccctgagccttgaaaccgatgtcccattaaatttttaaattttacgtgcatggatttttttctgccgacacggccgtctgtatattacacacatgtctggtatctgcaaagaccagggaggcattggatcctctgtaactggattactgatggttgtgagctgccacaagagtgctgggaatccaaccaagtcttccggaagagcagccagtgctcttaaccactgagccatctttcttagatattccgtctaagactgaatactcaacagcaacttaccctgcatgacagttaggagcctttgcatcaaccgcttcccactgtaagtagttgctcctctgaccaaggctgaaagcagtgctcatctgtgggtgtaagctaagtattcagaggacggtttgacagcatgtccacttagcaaatccacacaaggtttcaccataaggcctatgacctcctcagacatgggcttctgaccaccaggtttatagaaccagacatgaattcagtcttagggagtgggtctcaaatccaatcaggaagcagttgattacccttctaacagtcacgccactattgcacaaatgggcgcatctcgccaacatggcagtttacagggttcacatctgggtaagaacattgacttctctcccccacaggtctgctggcatcttccatactctgaatgctagccagtagggggacacttccagctcagctctaattttatttctctttgtcctgcaactgaactatgtggtgtctctttggcaatagggttttccctctagttctaatggacgaccaagagcaatagcaatagcctgtattgtctgagggcctctgggtaggagttctattttatttattttagtttttacgtcagtatgagggtgtcagatcccttggagttaaagatagttgtgagctgccatgtggctgctgggacttgaacccaggtcctctggaagggaagacagtgatcttaaccaccggggctatctctccagtccgtgaaagtcatgaattttttattttattttattctgagtaggatattccttgtataattattttcccgctttccttccacttgcattttatatttcaaattttgctttgcgtcagtttctttttatttacttaattttacactcgcgtgtgttcacctatgccatggagcatagaagtcagaagacaacttgcaggactgagttctaccatgtggaactccctatcatgtggagtcccggcaatctaagtcaggttttgtcccactgagccctcctaccactacagatggcacaaaacacaagggtctcatacaaacactggggtcagcaacaagccacctctaccccctgcactgtcttgatggcctttttattgatagggtctcattctgtagattaggctggcctcaaggcaatcaatcatgcctcagccatactcagctctttgtaactgtctcttaatttgttctactctcctcctggaagtacatcaaaagtgacaaaataatccccaaagagcagtcttctgggaaccagaaacaatgttacttgttttgtctttttttaaaaaatttaattagaaaagtgtttatatggagcttttgggtttggagctgcttgatattttagcatcactgctaaaacaagatgaaccgaggatggttcaataaaggctttttgttgggctgtatgttcgctctcacttatttactaggtgcacacagatgttgcaagacagtgcacagcaagtgacctcccaacacagcagccatctcgtgtggctgcagccaacattgcagtatgggaggagggtgtgaacaaaaagtcacatctgtttttagaggtgtgctaagtgagcacaggacgttataaggtgcaccctggaaaccctgcaggggtctgtgggagagagaaggggaagtgacaatcgggaaggttaagatctctttagtcagcaccaggaagaatgaggtccaggtagataaaacacagtgtggtcccttcagataacttcaagtgactcagtgtgctcagggaagaatggatgagagacctgttaaatcaggctggaatggaggtggcagcaaactgaagagcctgtggcctataaagtacctgagtgttatcttgaagatgagagggtgtggtgtggcaactggtgcatatggccacaaataaggaccccgggaaccacaatacaactccatgttgagtcactgtatcttaacactgaatgctatggatacaatctccacaagcaagcaccattttctgctactggattcagctagggtttgcatgaacacaggatctaagggaggtgggcaagggtaccaggatgggccctaatgacctttaaagttgctagcaaagttcctgacactaaagcaagcccagtagctaaactggtgctgtgggctgggatctgtggctggggagctgccctgggcagcaaatgggttaacactcaaatgacttttatatatgaattaatgtgcagggttaggagccaaaatctgttccattaatttttccatccattccaggagcagttaggtacacacagtaaagtttattttggtgcatggcatacttcactccattaaaaataaattaatcagcaaattcctgcctggctcgcttctggtttatgtaaatagtgcccagatgtaatgagttacaaggtgttattatctcgcactcacagaggacgcttcactccagagccccgcttgcaaccaaagcatcgcaaataaagcaagagaaggcggcttgatttgtaatgttttcacagaagtggcgtctacctcacggtatagagtttctttatatgactcattttataacaagttcaatgaagaaagctggatgggggagggagggcaagactgttcccaccccctttcctcaatttcagaaaaaccttccaagagatgacccaaactctctgagaggaagaacaggccccttaagagctcagaccaggtgtcccttacagcttatgcttcagaagctgaggacagggtagaaattgggctggggctggaatggtactcacaggccaggaagactttctcatgtaaaggatgtcactgtgggtgacaaagggacttctattctccagacctctttctacatgacttaggatgtgacaagccccttggtcctcagagacctcctgggtcccagagaatgtgcctggtggactgcgatttgcccagacagtggctcctctgtgaactggagacaggagcagcaagtagcagggagcctctgacctctctctgcctctaactgagctggagttaattcttgagcctggatcgtccaccgtctcacctatgtttctgttcttttttagtttgtttgtttttttgagacaggaaggtttctctgtatagccttggctgtcctggcacttgctctgtagaccaggctggcctcgaactcagagatccccttgcctctgtctcccaagcgctgggattaaagacgtgccacaaggaccggctttacctaggtttctaaaagaccctggaacaaagaagaaccatggcagaaatacatcttttttttaatggctacttcaaccccatggctcatagctgggggacagtatatggttatccatcttgacacattagaaacttctcctaggcacagggggccctgggtgaggggcccctttctaacctacccatcccttcctcagcctttgggaaaagctctcagtcacatgtgctgctggagggacttggaaagtgtgcttggggcttctcttgagggagggaacatgtcgggagagcgagatgacctcccggtagtacccccactggatcagactcctgggatcacaagaagaaactcaacacaaaggacccgagtattcaacaggtgctgttcaaaagtcagttcaggccaccttcttcagagtcctagataaacaggcacttcttccatgggggttcctcatagccagccagccagccaactgagcagtcagtcgggccagtctctcaaagaccctcatcattgtaagtaggagtacgaggcttcaagatgctctgtggattcttttccaccagagggcgccatctcacttctcctgtcagaagcagatcctcaccattcatggagtccaggtattgcatctacaagtagagagagcagggggacagagctgtatgtgagggctgcaaagcttccccaaggagtggctggaagggaacacgggtggtggtggtaacctgactgtccagctctaagattatggcattaagggtatttggagaaataattacctaggtcagtggttcttaacctgtggggtgaacagccctttcacaggggtcgtatatcaaatatcctgcatatcagatattttacattacaattcttaacagtaggagaattagagttatgaagtagcaatgaaataattttatggggatctccacaacacgaggaactgtactaaagggtggcagcattagagtgttaggaaggttttttttgtttttttttgttgttgtttttttgtttttgtttttcgagacagggcttctctgtagctttggaggctgtcctggaacttgctcctgtagaccaggctggtctcaaactcacagaggtctgcctgcctctgcctcctgagtgccgggactaaaggcgtgcaccaccaacgctcagtgcattcggaaggttgagaaccagtgacctaggaaattgcactgacgatgttgtagggaattccctatcacatatccccactccacccattcaatccctaggagggacatttaccctccgccacacactcataacaaagttcttacaggccaagaagttagaacagatgatttccagaagtcatcctgtctacatcttgccttcgatggtccccttgtctgagagcagccggaaatgtgtatcttaccgggcacaggggagagtaaacagcacagtgcatgccaaaccctggcacaccaactgcttttctaacgtgtttgactccactatccttcagtgggtcctgacactgcccagaggccctagtttgccccacccgactgggcaggctccttatggggagaaggaagactggggcttcaccttaggccttggattgtctcctcttccaagagctcactgctcctgtttcattttcagactgcctcttgagctcaggcccagcctctgacccgagaggctcagctttcctgggtccacagttcaaatgaaccacagtccacgcctctttctagcttccccactcctaccccgaatgccaccattttgcctacctcctgggttgttgattttaactgcagattgattaccaaatagtaaccaatacaatgtgtagtaccagagactgctcaaggcccggcttcctgggctgccctgacacactgggtcagagcatgcctttctctggcttccccagcaccctcctgaccctggaccacacacactagactggccagttcaccccagggctgcttgtgggcctgcatggctccagggcaggactgagtctcgaagatcagcccagggctggcactgcaggtgctctaaggcatggcagaactgggtccccatcaaagcttcttactctcttagggctccaccattgcccatttctagtggggtcaaatgagacttctcacaggggcatttgttaaggcaaacccttctttctgagcccctggagaggtcctggctatgccttgtcatggcctctggcacaagcccaccaggacagatggaaaaattgggtgggtctctaaaaaaagtgtttactttgccaattttgactcctgtctaagggtgaggctctctagccacagtgccttctccctggctctggcagatccgaagagcagtcaaatggcaatcggcttctggggttccctacgctccagctaccatcagcctcaacatgccagctttacatcaggcaactagctggtcctattagccctgtctgctccagagctgtgatctggccttccctttcctgcttgttggacgctagcaaggccatggaggtgaactcatggcacgatgccccttcagccccaggggccaagtccatgaagcaaaggtgtgactcacaacagctcatgctggtgagctgtctgcagctgctgtggtctccagtggttaaatgattcacccagcctgggttttgaggccagtcgtgcagggtgaaccactgggagaccccagaaaagcctccatgtcctgcctcaggatgagtgaatccattcatgcagacggaatgaatttcctgtccacgcaggatctagggcaggagatcaggagttaattctgcctggtgctcaaacagtcctcccaaggagctcatcctggaagctttagggtcaggagccttcagagccagaggggcaaggacctgatattccaaccctgcttgacagcaaagagcagccagtggggagaatttgacgtgtctgtcaggggctgcctgaagcctggctctgctagcagtaaggagcacaggaatcaatagccacaaaatgggcacaaaatgggcacagtgggtgtcactatgtctcattccaaatcttccagaactgagggtgtagtaattagcacagcacccagcaccagcaggtagtgaaacagcaaatgaataccacggctttctgaaagcacaaggctctctctttcctctcattccccacccctggcatcctcagcctcgttcacagctggacacgaaacgtgctcattcttcattattgttttgtttgagacagggtttctctgtgtagccctggctatcctagaactctctctgtagaccaggttggccttgaactcacagaaacctgtttgcttttgcctctgcttcccaagccctgggattaaaggcatgcaccactatgcctggccaaagatgctcattcttaaactaggtctggtggctcacagatgaaggcaggaagatcagaaatccaaggtcagtctgggctacaatgaaactgagagaaggggggggagacagagagagagggagaggagggatggaaagaggaagaaggaagaaggatgggagaagggagaaagaaggaagggagggagggagggagggagggagggaggatgctcagccttcatcatgggtgtgttgttgatgtggctgggtcagaatcccttaaactagctcctggtcagtcagcctcttatgacctaccaagatgcttgcactagcaccatgcactcaggaggactcaactgccaccaggtgtgagcagggagcgggtgctaacctgtttcctcacatactccaccagcaattcaagctgccgagggtcttcacatttctggttgaagaaggttctccagagggcagcagccagtccacgatcatcagaaaggatcccctagaacacacaacaagacgtgtcttgcagagccatgatattaacactgggatatttgaacaggagatcaaagaatggattcagatggagagagagggtaatgggcgagcttaagaacatctgacttttttttttttttttaaggggtgggtgggtgtggtgacagggtttcactgtgtagccctggctggcctgaaactcggaccaggctggcctcacaaagctgcctctgcctccagtgcttcttatttgtttaaaagtaaattttatttttattttatgtatatgagggtttggcctgcatgagtaccacttgagtgcctgtttcctgtggaggtctgaaaagggcatcagatcttctggaactggagttacaaatgattgtgagccatcatgtgggtgctagaaattaaacccaggttctctggaagagcacccagtgctcctaatcaccaagccatttctccatcccctcaacccttcttttatacagaaggccatgggactctgagagtcctggcactggctgaggtaatgcaaagctggcactcatgcctgttgcaccctcccaggtatagtccattctcctctacccattgtgcctggccgaggcaatgaatgtctgcaaggcccacccagcaaaggagtgtagtagccatacttctgctgctgttcacaaatctgtgtttgcctgggcatgggggtgggtgtgaactgctcatacttgtctggtccaaggtcacacatctgcaaggtagctggctctttgggaaagggaactgagtaccctgccttcactgtcacccgtctggccatgactggcttggactctgaagcaagggacaggctgtttagtaggttttccatgggccacacggggctgcctagggccatgctcagagcctgtctgtgtgtctgatattgcctctcctggcactgggaactcttgtttggaagcccggatattatagaggccaattacagccattttctagcccagacctctagggcagggaggatgaaggcaaatgaagggaaaggccctaagaagtgcatctgccttggtgccaaagtaggacatggaactgaagtgttgccttgaactcagacgactggcacaatggttatggctaaacccaagtctcagggctctaaaatgggtggggtggtgaatgcctctcaccccagggcttcagcggcagaggtaaaagaaaatacttgctctacctacagcatccttgaattacaaagatgaggtaatgtggcctgggggtgtggctcagcggtggagtgcttggttagtatcttcaaagccctggaatcaattcctagcaccaccacacaaaaagtaaagtcttttaaagagaattacatgtattgattttgcatggatgtgggtatgggtgtacacatgccagagtgcatgtgaaggtcagaggacaacttgcaatgtttggttctctgcttttaccatgtggatccctgggatccagcctggcccataaggctttgtggtaactgccttaactgaacgagctctctccagaacagcttttttatttttatgacagagtctcatgtacccaaaactgtcctcaaactctctatgtagccaagggagcccttgaactcccgaccctctgcctatacttcccaagcactagaattacaggcatgtgccattgtgccagtctgcaaagccattttgaaaagtgaaatatgttggatgcaatatacaaaagcattgctttcactgggagttagtatagtcgaggcaacagtgggatatgggagtcaaaccacctaagttcagtgccagctccgtcactttatggtagtgtggccttcgagaagacttagcccctctggagcctcagtttctcattcattagcagagcctgattaattcctaccccacagagacgatgtccacaaaaggctcgttacctagtaagggttacaaagacacagggacatttagtccatgttatacagtggtctgtggcatataagagggctgactacaggtcagctatcaaaaaggttcaacctacccatgggggggtaacagataggtggaaaagcacttcacctgctcgagatgccttctgctaaataacccccacagtttcacagcggaagactgtcctggtgtgcgatggctgagctgggaaatccgcttcttctagcagatggcaacaacaaccaaggacaagctcaggcacatcatcctcccgcaagctatttgctaacacaacagcccgcctgtgtgtgaagtgccctgggcacaggcgggccgctgttggcaggaacctacttatgtgatatgggaaggagtgggtgggagtggcacaggagcttggagaaagaatagagcccacaaagagagaagccggggagtcatgacctgtgcagtcagggatccctggagctggggagacggctgagacagggcgaatccactcacaggggtcctgagaagttagagggcaaagggggactcggaggtgttagccctgctaagaacctgttccagattaccaggtctctttgccagctagtgtctaatgactacctgcaccacaccactcagcacaggtgttattacccccacatgaaagataagtaccgaggctcagaggttagcgaggtaattggtgttgagaggaacctgcctgtactgctgaggtcaggggatggtagctgcctagcgtcacacagccctggcatacagtaccagtgtgctgaaaatggcagactccaacgccaaacccagccgcagtcttctttccatcagactgctagtagctcagtgaacacaaatgggagactattcaagtatgcaaatgtgaacgtcaagaaacagaagaggagaaaggtaccaagcattagggtgcagggccaattcctcataatctaggaatcgtttgcctcatggcataaaagaaggcgttctttaggaaattagcgcgtccaggtctagtgcggtagacaggaagctgtgtccaggtctagtgtggtagacaggaagctgtgtccaggtctagtgtggtagacaggaagctgtgtccaggtctagtgtggtagacaggaagctgtggcactgtcccggagtggcagctaccacctgcgcttcgcaccattctaagatgaacacagagtcacatcggctgagctcagctctcagggggcttgcaatccaggacgcatgaggcaacatagcaaagtcttggacagtgaacaaatgctaaggcccttggtgagaccacaatccactggtgcctctgcctcctcattcttcagcctttactttagaagcggtccttggagagctcctcctggtccacactgtatcttccactgttattctctaccggtgccctctaagcatttttctgcttatttagtagctacttgtgtgccacctgtctcagtaacttcaatgggagagagactgaaactatgtcagtttgagtcaccaacacaatcctcatctatcacacatgataaacatgctaaaaaccattgttaaatggatactgaaatgcagagtaaaaacacaagcgatctagtgaggtcaggaaagaagtttcgaagaagtgacctagggagatcagccaggcggtggtggcgcacgcctttaatcccagcacttgagaggcagagacaggaggatctctgagttctaggccaacctggtctccagagtgagtttcagaacatccagggatacactgagaaaccttgtctcaaaaaacaaacagaaaggaaggaaggaaggaaggaaggaaggaaggaaggaaggaaggaaggaaggaaggaaggaaggaaggaagttaggaaggaaggaaggaaggaagcaaagctgttttggacttacacatctaaaccacctgggaactttttttgttattttttatttgattttgtttcatgtgcattgatgttttgtctgtgtgaaggtgtcgtttcccctggaactggaattacagacagttgtgagctgctatgtgggtgctgggaattgaacctgggtcctctggaagggcagtcagtactcttaactgctgagccgtctttccagccccttgagatcttttgcagctatctactcacaacagttaagtcagtacctttgggtgataggttcctgacactgaaatttctagaaagtatcccaggtaatcagtgtattttccaggctttcctgttcatgtcacctgggtgcttgctgaagcaccgagtggctcctactggatcaaagccttcaaaggggcatagggaacacatttaacgtgtctcctgggtgcagactatgagaggctcccatgcacatacagacagcaacaggtaaactggtaaactgccagtgggtggggggggggggggagaaaagaaaggggagaggcaggtaagtttgaaggaaaaagtggtggggggggaattgtaggagagggaatgggggtggatttaatcaaaacacatgatatacatgcatgaaattctcaaacaatgcaaaaggggaataaaaaagctagaaacatagctcagttggcagaggcttgcctagaaaggataaaaccctgggttcaatccctaacgtgaataaattgacgagataagaagccagatgagattacaggcatgtgccaccatgccgtttcatcagtccagagaatcaaacccagggcttcatgaagtaagtgacctaccaactgggctgcaccccagtgttactctgtacacttcttccccacatcactgcaggtccagcactgtgttagacatcagaaacaattgggcactgtcacttcccaaaagaaagccacacccagccaggtgacagacttaatgctggttaagtgctgtaagcacctgggcaggtggaatgagctaagcctgggaaagttggggactctttcccaggaggtggtgcttgcataaagtcaggagttaaccacatttatcaagagaaaaatgaggtatgatgaatggttcgagtatgtatacaggtgttcattacaccatctttttaattttctacatgcttgaaatttccataataaagttggagggctgggaaatgacacagatacaacatggatgaacctagagacacgctataagccagtaacagatgagcaaacactgtaagagtctgctcatagagacagaaagtaaaacagtggttgccagggtctgggaggaggaggaagtggagaactggcattcaatgggcagactttcagttcgagactgtggctgctcagcaagcatagctttgtgcatgaggcactgcagacaagcctgcaggtgtaactcatttgcatagagctgaggaactgctatctatgtacttgtgacacctggagggagacttgatgaactatgatgacttctcctttggggctggagaagaactaggtctttatttgtatttcaagcaggtacatacagttttatgaatttttaaaatgagtatatgcagctaggtgtagtgacggcacatgcttttaatcccagcactctggaggcagaggcaggcagacctctgagtttgaggccagcctgtggtctacagagagagttccagaacacccgggactacatagagaaacgttaaatacaaaaataaaaaaagagcatgtcaggggctggagagatggcttagcagtttagagcatttgtttctctaaacaaatggcaaaggaactggattcaattcccagatttcacatgatggctcacaaccaacctaagtccagttccacaggatccattgcccccttctgacctctataggcaccaggcactcatgggtcatcatacatgttggcaaaaagttcatacacataaatgaatatgtgctgtcttaaaatgaaaactaaacacagtatacattttgtcccacatatcatgttgttttatgtatgagtatcaagcattccctggcaagagccagggctgtggcagtctgatttgacttagtgcccccatccagcactgagcaggcaggctctcaatgctaattcattgaatgtttaacaaaaacatataatgctctctttcccttgcactcgatgaaggtgaagaaataaatactaagaaaaaaggacaagtagagggactggagagatggctcagtggttaagagcactggttgctcttccagaggatccgggttcaatccccagcacccacatggcagctcacaactgtctgtaactccagttccaggggacctgacacccatggcaaaacaccaatgcatataaaattgtaaaaattaattaatttaaaaaatggcaaacagagaatatggtcctcaaagccttcacatattctcctcaaaggctggagagatggctcgacggttatgagcgcctgctgctcttacagaggtcacaagtgtggtacccagcacacaagccagtgacttgaaactgcctgtaacttcagatccaggactttcttctggcctctgcaggcacaggtgcccccccccacacacacacacatgcatgcacacacacacactctgagccttttctgggactgggtgtggttgtataccactttggttcccagtacccatgttgagtggttcacaacttaaagcctttaactccaactccaggggattgatgcccttttctggcccacacaggcattgacatgctccttcacacacatgtggcagacacgcacacaaattaaaaaaaaaaaaaaaaaactttaaaaaggaaggaagaggagttggaaggctggtgggcctttgttggggaggccactgtggcctaaggcttggcaaatgatcttacctcatcatatcccaagattgacgcatagaaactgtttgtcatgtaggccatgttcttctttaggatataggaattaacctacaaaaacaaaagtatgatggtaaggaaaagcatgatgtctcttagctgtcataggctgttgaaacaaagagaaaggaactcagtttaaactgccagtccatttccaagccccttggctgtcaggattttccacaacaaaactgccacttctttcagattttgattcaaaactacattcatttaatgactgaaccttcaactgaatgtcagttttgtgttagtattgatcaacacaaagtttcagaaacatggtctaattacaggaccacacagcctagcataggaaaacagacatcaaacaattactcacaggtgtggtagctcactcctgcaatccctagtgtgtgtgtgtgtgtgtgtgtgtgtaaagttaaagctcatacagcctgggctacatgagaccatgtctcacaaacaacaaaagggacactgagatggtttagcaggcaaaagtgcttgctatcaagtctgacaactggagttcaatccccaggacccacatgatggaggagagaagtgacacctacaagttgttctctgacctccacatacagacacacacacacacacacacacacacacacacacacacacacacacacacgtaaatgcaatttaaatgattatcttactgtgtgtgtgtgtgtgtgtgtatgtgtgtgtgtgtgtaatacctgaatgaagttacctcaaggaggaaggtttcattttggctctcagttctgagagaacacagtccattgagcaatgggaaatgtggctgtaggcaaatggcagggaagtgaggctgccagttcacatcttggtgaatcaggaagcagaaagcttggaccagaggtgaggccccactatgttcctcaaagcctgtcccctgcaatatacttcctccaggtagctgccacttcctaagggttccacacctttctaacaagtccatcacctagaaactaagtgccttgacacatgagcctgtaggggggcagtttacgttcaaatcgtaacatgataaatcaaagactgagtgacttctatcctgggattcctaactgtctctggaggtcggaaaaggcaaaagggtttgggtttagactcaagccctagctgtggtatatattttgggtgtggtcttgagcaagccaacctctctgaggctattttgtcttttaaatgccctgcacacaagaactgttttcaagagcacagaagttcgtttgcattcattcattaagttaacaacataccctggaagtcttggtaaacgtcagtgaactcgacaaacacaaggaactgtgagtaagacctggtttgtttatacaaaactaaaactaaaagcagttccagagctttacagttgtggacaatgttcaacagtgaagagagaactgtcaaggtcgaggctggaaagtgtgagattggtggtggctgggcgtgtaagccatggcctttcctacccagcttcaagccaggccacagtagccactgctcctttgtgctctcagggctctgtctgcatttctccccctaggtacacaatatggttgcagttgcttatatacctgcctttcccaccagtctgtgagcaactcaagcttggctcacaggaaacaggactgaatcattttggcacccaaacacctgggccaggacagggactaagaagggcatcctgataatgaatccctgcaaggtcaccacccagggctttggatacactcagagctgagcactttcctagcatatgtgaggccctgggttcagcaccccaaacgaacaaacaaaagcgagggctactcagagcatgctctatccaatgacacaattattttgtctcggttttgctgaaaagataccttccatgtttctgaaattccagaaatatatactactgtatttctttctactgcttcatctaatgtgctgtggtgagagtcagaataggcaagagttaagggttcctaccgtcgctcaaggacaagaggtcagccagcccttttaatacatcgggctcttccttacttctgtactggttgttcccctaaacgtgcaagatgaccagagccaaaaagcacgtcagggcatccaacacaaggcaaggcatcattcctaggaaaacatttaccaagcccgctcggtcagcagttagcttacacactgcatcatgccaactggctttgaagtggcaaaggccttcagggatcacctggcccactgaccccaaggaaatgaacggtgaagcgaggctcaaacatggaaagacacagatccaaagtcacatatcaagttaccatcagagtatgagtagaggggatcaaatgagtccatttcaccatctgacgggtatttccaaagatcccccaaatattattctgcaaagcttggttcctgctttccagagaggcccaagtagggacaaatgcaccttctcctggagaagatggctggttgcctggggagagccaggtataggattggagctcagtgttagccaggttctactccagtgtgcccctgtcacttctacagagagaagcaagctgccacagctaggaatggctttctcatatcactacccaggctagattagatcatgaaaaggtccctttctggaagacagtgcaagcttgatcactgcaacacatgatctgcaggcagcagatgaaggaagtgacaccaacctcactgggcccttgatgctggagtttccctctgctgaacccccattctactccactccttcacttaagcatttgtctgctggtgtgctgggtccccatctccccggtgctggatcatctataggaagcgtgttgcttatgaatactcagatcccccagcagaagatggtgttgggctgtttgctcattaaaatcttatcctgtccataatgctttgctttttataaaaacccatacatactgagccatcacatgggaaaggctccctttatatcagttactcatattttcccatttatttaagctattaaaattcatgcagatattttataagccatcaggattcgatgactgctattactgaatgtttaataataaactaaacagaagaaatcagagggttaaatgatgactgcaattcctgtaatgacttaattaaatttttattgagtacataaactatgatgtcacttctagccaaccatggctctgctttcgcagcatgtcacagggtgggagcactcaataggaggctaggctaaatgagcagcaggtctctgctgaaatgggggagggagcaaggctcatgtaacacactcaataaattatccgttcatttttaaacaaagtccatgagttataatatatttgccatgcactttttatgacataataaaaatgttaccttaaggattacttaacacatactacaaatgttatagcagaggcaggcacaaggggcaaagaaaacaaacatgaacaggccagggacgggtcctggagtttatgtcccgggggaacagcacagtgtattaaaaggggaatgcaaaaaacagggggtgcaagtgttcagggttactaatcagcagattaatgaatgagacagccaacagggagcacaagcaagaagggatctcacaaggcacatgtttaattaatgggagtattctcagggagggattcaagctttaaagagatgccagttcacttgaggctgcccctgtctccttctcactgctgcggcccttagatgcctgtgcttaacagagaactggactatggtatagagactgaaggagacctcggtttagcctacgagcactggcgaaggggcttcaggattttccctaggtcatttctctgacctcactcccttctgtccccccacgttcctattaggccttggtcagagtcaactctgccatttccacagctggactgtgctctcttgttcttagccacactaataggagtccttgtctttactaacggaagggatgctggtcccttctcatcttcaaagatccagcctccaaaatagttattcccagcctacaggtatcatgaatggttcaaagccagaaacaggtcacataattggctattgtcacatgctagcagctttgtgcatatttgctctattagtccttcctaatgaactctgagaggggaccattttacctccactttttaaattccagttttgctcatggagatctctatatttaaaatctaaccagtctaataatgaatgaaaagcaagatacatggttggcagtgatacccacaaaaccagcagccttaactcctgaatggtcacataacagacatttccttagggtttttaaaaagcaaaccaggcaggaaaagatgccaggcatggcggcacatgccttgtaatcccagcatttgggaggcagacatatcacaagttcaaggtcagctttagcctacaaaaggagtttgaggccagcctaagctatgtctcaaaatcaaacaaacaaatctaaacagatgactgtccttgcaaattaccatcacttatctagttgacaggcattcgaatacagttgttataattgctttggaaagcagctgatgagctacagtaagatcttgagaagatcaaatgtcagcttactattcttaaggagacacacacacacacacacacacacacacacacacacacacaccataccccaggctggggcccagtacttaaggaaaagctgagtgcagctgagcacagcagctgagcacatactgatcccgtctttcctggttgcagatgcagactgctcatctggctctggatgccttacctctctcaccttcttcactgaagtgcttctgttgggtattaccacagtaaaaaatgaggaaagcaaccaatacactcccaaacccagaaatgtggcaagataaccataattagacatatttaaaaaactacatacaaagttaaaaatgtattaatagaggttagagagacggctcagctgctaagagcactgttggttcttttggaggacctgggtttgggtcccagctcatagctgttaacaccaatcccaggggatacaatgctctctttttgtactccataggcaccaggagtgcccatatacacatgtaggcaaaatacccaaacacacaaaataatattaaaataataattataaaagaaaaaagttttattaccaggtaaaaatacacttttattgctttttttttttaaacttaccatgcttgaaaatgaatttcatgggaaaaccggagaaatatcagtgaagaacagatacagttacaaacactaaaactaataattggctaggacactcactgttatatgaccaagagaatcattcagaagttatttcatagggtgcttccatcatcaaactcaaaggactcaaaggaccaagagatttatttattctgatcctatctgagatgatgttctctccccctctaccttcccttaggtcaaggatctactttgctttcaaagtaagttgaaatactgcagatcctggaaccctggcccctcttcagagatgggcacatagcccaagctgatttatcaaattcttgtttctaagaacaaaaataaaactctgctacagttcagtgaccctaaagttgtataagctcctgtagctaaggtcccttggctacacagagtctttcctttccagggcctgttgttagaacaccctttccactttggaagcctcagttatcttccagggaatttgtttaaatgtgccaaggttggcgctctgttgctcacaatctgtaccatcattaatcaactcattaaaaccagatgactgggctgggtggtagtacacacctttaatcccagtacttgggaggcagaggcagggggatctatctctgtgagttcaaggccagcttggtctacaaagggagttttaggacaatctggaactcaaaagtgatacacagagaaacgctgtctcaaaaaacaaaaccaaaaaccgaaccaaaccaaaccaaaacaagaaaacaaacaaaaaacaaaaacaagcaaaaatgccccatatgatggaacatctgttgaacgtttactaagtaccagaggctgtaataaaaattttcaatgagttatctcttcaatcattagaataatcccaaagtcatttagaagaggcgtcacctcttgtttccggggagcttttcgagtcttccacacttgctgcttttccttctcctgggtctttgcttccaccaggaacactcactgcactatttaatgatttgtttataggccaagtccaacacaccgcattagacagtatgtcccttgaaggcaaagatgtgctgcccagcacaaggcagcttaaccagctagtgttttgccctaaacatgtcttgaagtagtggtttcatgcaccttcccacatttcaagaaagctccctgagaacaagagtacatacagctgctgctgtccaagtgggctgcaagcacagcgccatcaagatgaggaaacccggcttctgtcctcatgtggcccatgaaatcccagcccccctcaaacagcatgttccctgaaacaagacaaagggcatctcctccatcactagcacttgctggagctgtaccaggaactctctacagaaacccaatgtcacagagatacctgaggtcacagcagagcttctggctgtggagaaggtctctcacaactgtcagcctggaatcctgcaggtgtgttatcagcctttcacctccacctgctcttcaatgaggagagctatgaaaacagtgcaaagcttcccaagtagtgcttgctcatccttccaagtttaagagagtttaacgctagcaagtgttagtgcagacatgtcccaggcagtctttgctgttctactgtgaaatacgaaatttacaaacggaaaacagcttattggggatcaccattccccagtaatcatggtagaatcaataagcaacacaacgacctgaagtacaagcaacaggtagtttatgcactcctataaggatggctggaattaagtagggaccctcacaagagaatgtgaattggtgcaaccattgtggagaagcatttgacagctcctctacaggttcgacattgagctacagtgtgacccggcaagcatatctacagaaggagtgcaagcatggactggatacacttaaactaccatgtaaaatatggcaatggtgtggggcctgagggctccggggaagaggtgtcagccatcatatcagagtgtgcacaggttgtgttcagacagaaagggtggcatgtgcaaagccatggagaggagaacaaagtatagtattttcagagcaaagtagaccaggttggcctcaaactcagtgatcctcctgtctgcctcttgagggctgggctttgtattgttgttgttttgttttttgagacagggtttctctgtgtaactgtggctgtcctggagctcactctgcagaccaggctggcctcgaactcacagagattcacctgcctctgcctcctgagtgctgggattaaaggtgtgtgtcaccaccgcccagtgaaggctgggtttacaggcatgtaccacatgcagcttcagagcaggtttgtaacaaacaaacaactacagtgggtgctgagatgtaaaggcacttgccaccaagtccaatgacctgtgttcaatccccatggtaaaaggagaaaaccaactctcatgagctggcatctgactttcacatgtgccacaaggcatgtggtgtgtgtgtgtgtgtgtgtgtgtgtgtgtgtgtgtgtatgctcatgtgtgaaaaccaaaacctcatagtgggcagaagcagaaaggcaaacagtctttattgtctgtaaatggccccaaatgccacacaaagacaggaagctgcatggacacaagtaatttctagcagtgtggaccacagagttgggcagaggaccagaggcagaaatcacaggggatgttgtgtaataaatagtccaggtgagagtgaataaggaactcgctcaatggaagcactgaagggcagtgtacagctgggtacataagcctatagtctgagcacttgggaggcagagacaggagtatctgaaagtcaaagttagcttccattaaacaatgagttcaaggctagcttgggctacatgagaccctgcctcaaagggcgaggtagtgcaggaccaatgggatcaggttatcgatcaatgaaggagcaagggtgaggccataacctgcacataatcagacctcgctgaagaaaaagcaaagagaaaagaaagatggaaagcaaccaccaaatacagccacacactggtgactttccaaccctggcagcactaagtgtagacaaccagtcttgcagggttctagcaatcactgtgcccttaatgtcttctgtgctgtggtaatggaaaatcttacttggataagatgtaatgtgagcaagatgtgtacttagcttgagcccagcgggcgtctccaggggagcagaggtacagcacaggagggctttaggagcctgtgcttcctttccagtcatttgttcactgcatgtccgtagaagtcattcctctggtcctctgtattcaacctgtgaccacgaaacctgatgactgtcagtgagaagatgctgacacacatgggtttctagagacattcacagactcctaattgtaccctgggcctcatgatgacatttatgagtacagaaagctataggcacaactttgctttcttaatgattttctattaaacatagacagggtacagtgaaaaactataaagtgcttgctccctatcacaattaggggattcaaatacacaatgtggtctgataggtaaaaacagataacaactcagtgaactcttaactaagacaaacaaggtaaaggatggtggggctgaaacaatgtacagggacctgaggactatcccagttcttgtcccactcagcaatcctcaaatagatccatgacactgcacagcaatgtttgcttaggagccaccatccagctccttgtcatacatactaagagggttctagctacgtcacccgacagccctgacttcctcttcaggtagtgaagtggggatgtccccagtgaacagagttacacaatctaactggtgactccacctgggcctagactaaagtctgcagactaaacagtaaagcagacatttccattggccacaggatgtttctcttttaccactgtgtccttattgcatactattgggagttaaaattttccaagtgaccaacccaatggtaatctgagaaagaggtcatttcccagtgcagaaatgaggaaacaaaggctcagacagctcgagtgacttgtccaattatcatagcccaacttgtttgtgagtgacaaggtctcattgtattgttcaagaactcctgggctcaggggatgtttttgcctgagcctcttctattttggcacattgttcttttaaggctcagagagacctgccattcagtaaatggcttatagaatcctatagaagtaccctggaggaggctgaactaagtgtgcaaataagatcactcccacccacagtgactgaggaacaaactttgtttggatgtccttaaaatggagctgacacctggtcttgtgaactctgagtggctctgtctctaaagagtattgtcttctttttaaaattatatcttttatgtttattgtatgaatattttgcctgcatgtatgtctgttggccatgtgtgtacatagctcctatggaggtcaaaagaaggcctcagatcccctgggacagaagttatagtgactgtgagccgctgtatgggtgctgggaatcaaacccaggtcctctgcaaaggtagccaatgctcttgacctcagagccatctctccagcactttttttttttccttttcctttttaataagcaaaatgttctttaaatggtattttatccaaaggaaagagaataccttggaaagaatgccatgtcctgtaaggacatctctttgatggtctgtattcaagacaactattaaattgccctgttatcaaagcaaagtttaagttccagtagccattcccccaccctgtcagtctggaaataaaaatcactcccagactcagttttgcatcaaaaccatgcctaactgccttttctcatattaacctgtgaggggacatgttcatcaataattaataaaataattatctatttcccagcgctgcttcaaggtcctcatatgtgacagatacctcacaatactatagtttgggacaagaggctgggtaccactgtcatttctttttataggtaggaaactgaagcacagagactatgtaccttggccatatggctggggcagcctgtgaacacatcaagcctggcttggccaccccactcttaaccactctgtgatatgctcacaaaggaagtttcaaactcacctaagggggagagtttgcatttctcatcccacccttaaagcccgccccatcctatctccattcactcattctatctacactaggacagcttctctaggaagcgtgccacaaaacaaaacagcaggtgagctcctatctctcttgtttatctatttagtttggaactgaaaccaggaagacagccatttatcttccaggcactaaactacttgtaagccctgtaaggtcacttttccctgaaatactcttagccaatagtatttagaggttagtgcatggtaaggaacaaacaaaggtgttccttcaataatgaatgaaacaattttttttgggggggggtctttttgagcagggtctcatatagcacaggctgttctgaaactcaacagcagtggagaatgacttggaattactgatcatcttgcctccattttgcaggggatggggttacaggcatttgtcatagtacccagctgtatgggagaaaagctacacaagttaataactatgtaggttgggggtgagggtaacaacaagtaagagcactgactactatagaaggcaatgtcaggtgtcttccataactgctctttaccttttttgttttttgagacaaggtctcttactggcttggccatactggctggccagaaaacctcagggaccctggctcttccttcctagggtcaggattgaagagacttccctaggtgcccagctttttatatggatgcagggatttaaactggggtccttacaattcccagcccgatcgaattcttcatggtggtgtagggcgtctggaacagagaaggaaggagtgtaggaagccaaggcccccaaaagtaccacaggcccctacatgtatcaagctagatgagacaggataaggccagccctcctttctctagagagaggcttcctctggcaagcaattcacttggggactaaagcactgcagacaataaacagctccagtttctaaaagagaaagctgtgcatatctactctagatgccaaagacaatggcttatttgaatcccaagaaccttagcaaagggcactggaccgggttgaaaaagagaggagtgggggcatacagaaagccactgaatacccagggggaatcatcttttatcccctgccccagccactcacaagcccatggcctagaaaaggagcgacagatagtttacaccttttattattctgatagaaatgtctctcccgggagcaggcaggggtcaaaagtccaacaccaaaactatatatctttataagtcatgagcaaaaaagcattacagcagttattaaaaaaaaaaaaagccacagtgaccagccgagcaggaggtgttagaaaactcactccaaataatttattcaccgagaaccacaaagggctttcccaagaacagcaaaaacaccattaatttccctaggaccctccctttcaaagggctccaaacaccacacatttcatattaaattgtcctcaaagacttcaaaataagggttactatttccctaagtacagatgtagaaactaaagcattcatgcccaccacactctgaccaggccatgctaaagagtgagcctgcttgtgtccgatccaggcctcctgatagagggttacaaagaccaggagtaccacctccatcccccacaaagaccaaaaaaaaaaaaaaaaaaaaaaaaaaaaaaaaaaaaaaaaaaaaaaaaagaaaaaaaaaggatctctaccctccagaacaccagagtccagtagtacaaggcagatgcacacatattccacttacgtttatgcgaactgctattggaaaggcccatacacagcctgagagctgccatttactggggcctgatatgttcctaggagtgagcattgtttaagtcacccaacagtatgtgactaatagaaagaatgaaggcaaaaagaggtagagatttgccaagggtcctaaggccacctgagccagagacatgactagaacccagatccgtctatctggttgtggaaggtcctggagctgcaaggtgactgcttgggaaatgaaaccggcctctgggcttttcagcactgaatgcctacatggtagagacagacagcaggcacacacacaacacacagacagctgcactgcatttgagaggagcctgttgcccaggccagaattgcatatgcctacattaatagggactttccatcaggggacagctcttgtgtctttcaaaggggaacaacaaagcgccttctgggcaaagaagagctgagaagtcctgagcctttcttgttcttttgtgggccctggagatgtaataaggccaagaaggtcttcatcctggtggcctgctgtaaaggcaaccctgtagcctttgttctgagccagactcctgctgttgtcatccctgaagaagggcacagtgcagtaacatcgaggcagaacttgtctaatagctgtaagctctgtaaaagctctagtttggaagccaagaaagaaaatgccagacttagaggcaagagagcagcaggccacagtccccacgccagaaagactactgaaaaccatagccagtcatggggactgcctgagtcctaataacagggagacagatgaggaaggagttttaaaatcttaatttcaacctaacaaaataggaaccagctcatacttaacaccagcagcttgttatgtaatcttagaatcagtccatgtggccatcaacatacactatgagtcactgtttgctctattagtattacttgtattgtacctactttgaaaagagttcaacttaacttaaaagtatatatgatggctaagaggccagagactttgaaacagtcagatctggcctgtgactccagtggccacaggcacatgctttgctcttcttccttggttcaaatcagctgtaaatcatggatggattcaaggctatctaagctcatttagtagggataagcaagacaacaatgactgcaaactacccagctagcagctgggctcctccatagcgtacatctaactcaaaaaccaaagaggtaaggaatagagtgtgcaagagagagggaccagtgacaggtcctatcgaagcatctaaataagggaagctttgtacttcctaggagtgccagccaaagggaagcgggattattaccctgttctcatggttaatgaaggaagcctgtaaactcatcaggacagaggaagtgctgaggtactgtaccctgtaccctggagtaaatgcaaatgtgtgtgcatatttacacacacacacacacacacacacacacacacacacacacacacacgatgggggaagaggttgaatggctctccagagccttgctgcccccctgacaccacacagctgttgcctccagtgaagtactgcaagagttaaaacatttttgtgccaatattttaagagtgcagaaggttccaaattacatgtaaaataaacaatgccagactgtgaaaactcttggctgcaacgttctctgatgttaacaagagtttctttattactgtaacctttcagaagtgaataaaaattatttctctgccctagttttgccctccagtaaaagtgaagagagcagtgaccatggaaagagctgtacaataactcccccccccaaggctgggggctgggaagggggcagtcgaaaacaaagccttccatatatatttcttttccaaagtaaaaaaaaaaaaaaatgctccccccccccccccccacgggcggggggagaagagnnnnnnnnnnnnnnnnnnnnnnnnnnnnnnnnnnnnnnnnnnnnnnnnnnnnnnnnnnnnnnnnnnnnnnnnnnnnnnnnnnnnnnnnnnnnnnnnnnnnnnnnnnnnnnnnnnnnnnnnnnnnnnnnnnnnnnnnnnnnnnnnnnnnnnnnnnnnnnnnnnnnnnnnnnnnnnnnnnnnnnnnnnnnnnnnnnnnnnnnnnnnnnnnnnnnnnnnnnnnnnnnnnnnnnnnnnnnnnnnnnnnnnnnnnnnnnnnnnnnnnnnnnnnnnnnnnnnnnnnnnnnnnnnnnnnnnnnnnnnnnnnnnnnnnnnnnnnnnnnnnnnnagaaaaaaaaaaaaaaaatcccccccccccccccccgagagtgtatctgcatatgtggagtcagaggacagcttgcaggagtaggttctctccttccatcatgtggatcccagggatagaactcaggtcgttaagcctgatggcaaatgccttcacccacagaaccatttcaccaacacagactcccatatacatttagtttgggctatgggtcatattgtacaatgtcacattgctgacatttgtatcacttagaggcacaatagagcatttgggaaagcccaaaccaagctgatactatgaagaaaattaagatctaagcaagaccccttactacttgagactgaagtgcacatctttaaccccagcactggagaggcagaggcagcagactgctctaagtttgaggacagcctggtccacacagagtctaggtcagccacagctacagaaaaggaccctttctcaagacaaacaacaaaaacccaaacaaggaagagggtttgtgtgtggacaatactcaggacaaaatatagtattgtacagacccttgagtcaatgaaacagtaaatatcagacatgcagaaggatcaaaatagagctagagaaagagaacccactttcaccaccacaggaaaaggagtaaggccagcaaatgaagtcaaacactgccccctctctctgtaacactcagtcacctagaaagccatcccaaatgtcatctaacctgagctctctcctctggcattctcagtcatttaattgtgatttctcattattataattatgtttacgtgtgtcctctgctagactaggaagtcttagtcatccttgtatctctgatgcttaacatagtagctgcaagctagcaggccacaataaaatcaacaagacaggtaaaatgttatgcttgatgaactgccatttaaaaacaaaaaagcagaaccagaacataagctctggaacataacatgaggcaagctttttagtcctctcagatgcagaaggttgagtctggaaaagaatgtggagattacctaacttacctctcagggactcaaggggagtccctcaaggactcaaggacttactcaagagtgactaggctggttagaactccttcctttaaaccacacccacaccaccccttcattagcctgaaatggtagtatacatgttcattttctggtaggataagaaatgtgattaaaaactgtatggtgagaatgcaatttcattataaacaaattgggggtgtgtgttgcagtaatggctcaaaggttaagaggaacatgtgtgtactgctcttgaagagaacccaagtttgattcccagcacccatgtcaagcagctcacaaccatctgtgactgcagttccaggagatctgacaccttcttctggcttcttttggcactgcactcaaatgcacacaatcacagacatataattaaaactaaaaaataatatgcaaacaaacaaactatggatatcatgttaggaattagaatcacttgatgtaacaatattaggttcccactaaagctatcagttaccactggacccagtgaatcccaagaaaatagaaacatgttcagacaaaaccttagctcaaatgttcaatgtcaacagactatccataaagagaaaaagcaaagtatgctacaacacaaacagaccttgaaaagatactcagtaaagagagtcaaatgtcaggctgggcgttggtggtgcatgcctttaatcccagcactcgggaggcagaggcaggcggatctttgtgagctcaatgccagcctggtctacagctggagtgccaggataggctccaaagctacacagagaaaccctgtcctgagaaacaaaagagtcacatgtcaaaggctgcaaattatattacattacattctgctgggatgaaaagcccagaaggggttaacccaaagagacggcaggaggggtgggaaatggacagttatgagcacagggtttctttctgaggtgttgggaatgttctggaattagacagtggcgcaggtccataacactgtgaaggtaggtaaaaccactacttattcattgtgcatgcgtgcaggcaagcatgtaccacagctcccactcgtgccccccccccccccccccccagctcccgccaggcccagccatttcatcagccaaaaaaacacatttaaaatgtggaatgttggaagaattatgtattcattttttttgtttgtttgtttagtgaaaaaaatggaattcctccttctaggagctaacaatagaatgagaggagccaggatcagtgaaccaagatgtcttgtgacatgagttttgaagccaggggaagaagtaaatgacagtggttatcttgatactgacactagagctgttgctttctgggcatgtcagacagcacaacgcagtgatcagaaaaggacaagctgcagggagaggggggactgtagcacttgggaggccgagtgagcccttggagactaagtatggtaagttttggggtttccatgcagacttggttaaattacctaaatgggtaacagccttccagaagacccccatgacctctttcctggaacccgtggctgttactttctacagaaaataaagaaagaaagctataggcctgattaagacctttaagatgtagaaatcatttgaaagatctgaagggccctaaatgcaattccatacatccttacaagagaggctgagggagatttgaaccagacagaagaggagaccagaggcagaccggagatgcagccacaagtcaagggatgctggcagccatcagaggctagaaggggaagacatacattctcccccagaaccaacaaaggagcatgggtctagtgacattttgatctcggcccagagaaaatgacttttttcttctatgtcctagagtctaggaatatgagagaataaatttttgttgttttaggtcaccaagtttgtgataatcaatatcgtagctgctaccagaaacaaatatactattctccctgatcttctagttttctcatcagtaacgtgagggtggagtgctatcttgcagatagacagttttaagacaataaaagccaaacagttcttgtaagtcctgattctgtgtggctgcacacccctctaagaactcacaagcagagagcctggattccccagtcagtttctgatttagactctactctctggctctccattaggtaaaagacagggtcagaccagggataatggttctgaaacagaagggcttgttttaaaaatgaaaaaccctgttgggccctgtattagctaatttattactgtgataaaacagtgaccaaggcaacttatggaagagtgtgagcttgtggtcccagagggttagtccacggaggcagggtaagaggcagcaggcatggcggctggagtaggcacaaagaggacagacacagagggagcaaacctaaaatggcaggtggctttgaaacctcaaagactgcccatagtgacatacttcctccagcaaggccacacctcctaaacctacccaaatagtgtcaccaaccggggaacaagtattcagacatctgagcctatagggggcagtctcgctcacaccactacaggctctactcagagctgattcttaacaaactcccaagtgatgtggaggcttcaggtataggaacaaaaatctgagactctttggaccagtcagttcaagcaagattctttttcaggtggaagtctaagcttcccagtgattatctgatgatgaagcactcaggcaataagccactgctgcacgtgctggaacagccttgggacacacttaccctggagaggaagggtttgaaagagcgaccatgaggtgtatggtgtaggctagtttttaacttttcaaagatgcagaacaagtctgaaacacagtgggaacaggaaggcacggtctccttatccagcaagccggccccattttaatttatcttaatcccacctttctgcttctccatcagacccctccctgccatgccctcctctagaaacacatctaggtgtctcttgaattcatttattggctttgccaggagcagcataatactgcctttgttagtctcctggcccagccaccctgttctgctcctctaaagaaaaaaaaaaaaaaaaaaacataactaaggagtctctgaaaaataattataagatcaactgaggcaaattcacaagatgcagagacatccaactctaaatgctgggaaagacagagtcacatcaccactggcatcatccacacctgtcttttctccccttagtctctattagttctgaataagaaacctctgctgtactggattagaaattccaaatgaaaagggacctcaggcttgagtctttctaagaagcaggtatttccagattcaaggaaagctacccccttggtccctggtaatgagaccaatgaggaggtggaatttgggggctggtgtcaggggatactgggaataggaatgccatagctgtggtcctcacgcttccctgtgctagctggacaatctggggcaagccactcaacactgctgagcctcaatttccttaccaagaaatgggaagggactgatccatacagcaatatatagtcttcgtggattgaaaactcagagttaaataatctcccaggtcctcactcgccagtttaagagtgtgaggcccattttccctataaaagtagattcagactacaaccacagaactcaggaggcagggtgggcagagaataatgaaccttttgttggtgatgctggtggtagggagaagagccacagaaaacaaatccaggtatgaccggagacgattgttaaccagatgataatgctacaatggagcacctatgctcacccaacaagaatgagcactgataacaaaaggcacactgatgcacagaacaccaggggcatgagagtccttagcccacctactgtacgttacttgcacaaataaactatggcacaccatacaatgttccagctcacaaatttgtacagggggtgctagggagatagcttagcaggttaagaccactgactactcttgctgaggacctaggttcaattcccagaaaccacatggaagctcacaaccatctgcaactccaagtccaagggatctgatggcctcttcaggcatcagcaaacacaagtaaaaaaatacataaaataaaaaatttaaatctaatttttgtttttacttttgttttttgattttttcgagacagggtttctctgtgtagctttggagcctatcctggcacttgctcggaagaccaggctagcctcgaactcacagagatccgcctgcctctgcctcccgagtgctgggattaaaggcgtgcgccaccaatgcccagctaaatttaatttttttaaagatggctcagttagtaaaatgcttgccactcaaaggacctgagtttagatccccagcacctgcatttaccatttgaggtttttgtttgtttgttaaatcatttgataagtggcagacatcaaaacactctagggactctaggaggaggagagggaaatgatgtaattgtattttaatttttaaaaattgcaaatagccgggtgtgatgttgcacacctttagtaccagcactcgggaggcagaggcaggtggatctctgtgaggtcgagactagcctggtctacagagctagttccaggacagactccaaagccacagagaaaccctgtctcgaaacctcccccccaaaaaaaattgcaactagaacatttaaacattttaatattttaaaaacatataaacagttcaatgttttatttaagaaaatacaacacttaggaagcagaggcaggaggatctctgtgagtttgaggctagcctggtctacataacaagttccaggacagccagggctatatagtgagactgtctcaaaacaaacaacaaaaaaaaaaaaaagagagagagagagagagagagagagaaagaaagaaaagaaaaaagataaaagataaaagaacacatttgcttatatacctacaaaaggttctatacaccacattgccaagatgtttaaatcttgtcccttatgtgatgagaacactcagaggtttctagcatgaaagggacacgatcagatacagggcttaggaagaaggcctctggcagtcggtcggtcggaggactgcctgaaatgaggacagccgagaattccttcagaagtgacttgcaataaagcagagatgaggtctgaagtgaagcaatggatcagtgagggtaagagctacagatatctaaatggcgaccgacaagccatttagacgaagaggagggggcagaaattgagaatgactaagaattcagcttaggaggctcaactgaaggtggtgacatcagatgtgagacaggaaggatgctttcatggagctatttgtcctctgactcggagtgagacttatttggaagaagcattggcagctcctgaaaggtgagctggaaaatgactctggctggctgtatccattgccagcacgtccaccatacactcacctctaaccacgtgatgactatggaactggggacagcaaatgaaaccaggcaaaagaaacaagaagggccagggggagacctgttcccttgaaaggagagctaagcgaggagcctgtatcatgaggagcactaaaggagggatgcgtgtgtctatcacggcctccatgtggaagacagttttctccttcgaccttgtgggtcaaactgtctggcttggcaccaagtaccctcacttgctgagccatcttctcactggtccccagaaaggactttgaaaaaaaaaggaataaagtcactgttccttatataaattctaccaggtatgggaatccagctaaataaatgtaattgaaagaaaagggggggagggagacacacatgacagacgacaactgtttcagtaacttgagaacaacaaagggatccaattcgttatttttatccacttggtgaagacctatttgctgaaatgtctattttttttctttctttcattcattcttttttgtttgttttgtttttcaagatagggtttctctgtgtagtcctggctatcctgaaatgcattatatagaccaggctagcctcaaattcagagatccacttgtctctgcctcccaagtgctgggattaagggttgtgccaccgccaccacctggtttagagctccatttttatgatttagaaatactaagacctcaggaacccacaatttaactgaatgtaaaaatggcactagagatcaatgaccaagtgcacagctgcaactcatttcaaatacagaaaggtttagcaatcgtctttcaagaactcctggttaaaatgaagtgggtccaggcagagcctagtatgtaagctcccccagaggctgaggcaggaggatcaaagtgcaaggtctacctggatatagaagttcaaggccaacctgggcaacctagcaagaccctgttctaaaaataataagcaaaaaggaaggctggggacctagatacacttagcatcctcaaggcattagattggatcctcaacactgaggggtggggaaaggtgccaaactggttggcaaccgcctgagtatctcctcgaatgctcccctgctggcttttagggactggaggttgtacctcacggtggacagacagagtacctcgggggtatatcctctgtggactcagctcacaatgaaaaaactattttgccttctaagaatttaactttggggctagagagaagactcagcagttaaagtgcatctgctcttccaaaggacctgagttcagtacccagcatcctgttaggcagctcacaaccacccgatactgcagctttgagggatctgaagctgtggacagatctggcctctgtgaacaccccccccaacacacacacactcatacacatacacatacccccacatgcaagcttttaaaatctaaaaatttatcttctcctaatatctactctaatatctgagtatgcagctccaatagctcaggccatttaaagaccttccaggagctcctgatgtctaagaaaaacacatattcttattttcatggcctccagtctaaagggttcctcattcatactcacatcctcatgctctatggttaaaaaatacctttgacacacttccttcaaaacctttcacactgagttttaatcctgaccttgagatgtgaagcacagcacaggaaaatagaagtttaagatttttttttttttcattttaagagacagggattacacttaagtccatgagtgtgctaggcaagcattctaccactgagttacgtccctagccctctctggaaatctttatggggagacagagatgggggagggactattagagacttggaaggttggaaggagattttcagaaaaatctaagccttgttaatatccaaatcccacttttgaaacataaaatgccctattataagctagggcttaaaaaaaaaaagtcaatcaattccagtggaaaatagaaaagcattgaaaatagaaacataaagactgacagtaggagacaggtaagacggctcagcagtaagagcacttgctgccaagtccaacagactgatcagttccccaggacctacatggtaggagggatgagctctgcaagttgtcctctgacctccacacacatacttcagtgtgtacacacctgtacacatatgcatggtcactcacgaaaataaatgtaatttaaaaaactacagtaaaggaaatcactttttctccccaaaactaacacagctgacaaatatcctcagaacaacaacaacaacgaaaaagggcagctccatttcccaatacctatcccaggctttcattcttcagatatttactattcggccaacaggcagaattataagcactctggagactacaaagagggatatacacatggtcctgaccctcagaaattcttctagaagatggtcaaaaggcatggacaaccataacataagagagaaagaataaaagcccaaagaaggctacataaattattatgatacttgcagcaagggagaagcggattggtcccactctggtaaaggcaccggggatgaagtatgaggacaatgtaagtgtacacaccgaagaagaaaagacacaagacaggagcagcaaggcatttggcttggctggagggaagggtgcgtgaagcaagaatggaatgtgactctcactaagtgctcagtaaatgccaagcacgtgtgctgaaggttcaagaagcactgtaggaaatgagtttggagcagttgacatagactacaaagtgtgaccagagaggactttgcaatgcagaacactggttctgataagccaagcagtagttcacctaagagaccagtttgcgccagggctccctaccagctcttccctctgttccctctgatcaagcagctcggaaacaaagagcagaggacaggagggtcagtcttactctggagtcttattgaggtaacctgagtgtaggaaccactgatgagaataaattgtaattccttaactacagcctatccccacccctgcccaccttggcttggaaagcttaaacctgctcattgtaagccataaggtggagatgtctggcagagcagaactgacaggaagtcatttcaccagcctaaggttaccattaacactctgagccactgccttgagctaattcttgtttgttttcgaagtttggttgaaatgtcacaaatggaaaatttaagtaaagcacccagttagccccaagcctggacacacctggtgcaaatccagcaaaagaaacttacttcattagtaggagaggcagagtgaaatttacatctgaaagctgcctgcagccggagaaagtactgaggccaaagggctgtctgtttttacagctgtgtcaagtcctggttctcactcctaccaacactcaggagcgaggcaagggccaaggaaaaatggtctccagctcttcagctgcaacccggctcacaaaggtttttaagacccagttaatgaaataaaacaagaccagatgaggtgatataatgaactttatttccacagctaatttatatgtttaaatcccaaatattgaaatattggtgggttttttttccttttaaaaagtcagaacactaaattatcgatgtgatttttgtaacctcaaatttagcagttgctttttgcactggcttcaccaatgacacatgagtctgagccatgtgccaccacagctgggcttcttagaagccgatgaaaagcaaagtttcccctcttatgagaccagaactcgaataccaaatgagttcttgattggaattcgggtttcaaaggaattgttgattaaaatttctgactcgtcatcagtttgcaagaggcgcttttgctcttgatctctgccacacgcatccactcaaagtaatggcttctaagaattctttggcatgagaaaaaccgcaccattgactggctttgtaagttttactttcttctatgacttttcttacagaggtatacctggaacgccaaataacacagaaagatttgcaaattaccaccttcaaatctggagtttttcaaagctgaaaagaaactcggcagccatgtagtcagcaccttggacctgcttctgtgtcctctagagcacaggaagtcaagacttgtccactgtgggagaaccaggccagactctattcattccacctactgatttcaaagtcacatgtccccctgctgtgggctgtacactaacactgaaagcccctctacctgcacactctagtatacatctgtcttcctatagaaaaggtgcctgtttataccatcaagttagaaagggggagtatcaaatataataaagccaagaacagtaattacccaattcttctaaatttgtatttttaaaacaccgtcttccatttgtagtttttgtcactaagccagagcttgggcatttctcttcatgaagataatttagaagcctaggggaaatcactaacatcttgctattttaaagtatggttgtcacctcccacacccctattaacacaggcaaaacctggaagcttctcagaagagtggacactctaaactgggtgtgatggtgaatacctgaaatcccagcccttgggacatgtgagcaaaaggacaaccagagatacaaggtcatccttagctattcagtgagttcaaggttcagggtgggttacatgagatcctgtagcagagagacagaggagagaaaacagtctcaggactgaggatatggctcagctggtgcagtgctgggttcactcccagcacagcataaaaggggatggaggtgccccctacaatctcagcattggggagtggaggcaagaggatcagaagtttaaggtcatcctgggttacatagtgagttcaaggcctgcctgggctactctgttaaagagagacagagagaacaagacagagagaaaggagagaagaaagaaagggaagggagggagagcagattccctggcctttgtcagagacttactgaatcacatctgtgccttaccagggtcaccgaatgaactggaggtgcactaaaggcaggaacactatgctgccctataggatggcacactgtctaggaacaatccgaatggacaaaagaggagaaaaaaattaaaaagacccctgcaggactgtacagaaaggaatgagtcaagtaccattaatctaatgttaccttaaaacagggtatattagcatcatggtgcacacctttaatcccaggacttgggaggcaacacaggtatatctctgtaaataagagaccagcctcgtctacatagtaagttctaggccagccagagctaactattctgtcgcaaacaaacagaatacagcagagactgcagtttactttgtgtcctccctcattcaacccatcctatttgtccactagacatcaccatataagcaaatagagtgagacagcctcctgttcccaaaagcgtaagccgaaggaaggagagggagatcacacacaaagcgcatggagaagggcaaagtggcagctgctgggacatatggaagagaaattcagcgggagagggtgtaattaaaaatccccgtggtccacaagtcagcaatttctggattattaagctatttaggacaggacagctgtgactcacatggtcccagaggtcccactgccagcaaagttcagtcaacagagataagccaaacaggttcatttaatggaagggacactaacacaacacctggcagtccacgaaggctttggctggccagcgggtattactggccatcactaatagggtgagttgagatgccaacaccaccctaagtccaatgtgtgctgccacagaattgagtagtaaacacttgaggacgtagaaaatgcagctgtatgagttgctagtctgctgacctccctctgaactgaaagaatgccagcaggcatgacagtgggagaaatgaaacaagaaccagaggacagttacaaaaagagctcagtacagggccagagaggtggctcagggtttatgagcaccacttgttcttgaagaggacctgggttcagttcccagcacctacatggtggctagcagctgtataagtaaagggagtagagggatctgacgccatcttctgaccaccttgggctcctgcatcttcatggcacacatacatacactcaggggacacatacatacacattagagagctcattcgtgacttcaaggcaggtggtgatgataaaaggtacaattgatgtttcattttctcagaacaaacagaaatgccaatggtatgctgtccccacagaatgtaatgtgaatgcccataaagatactcaaaggcaaacccatgtttacagtgcttcctacactccagttcattcagagacataagaaaaccctcaacccaggatcccaagaggaaaccatgttccacatgcatggtataagtctcaaagattgcaattttacacaagcaaaagtacacggggttaacaggcagtacaataggagtatgtgaaatgggcaaagtaacaaaggtcagccatgactgaacacccatgtagcatggaaagacctccaaacaatgctgagtaaagagagagttgcaggaaagtacataaagaatgagatcatttgtaacaaaacatacacacatgcacatatgtataaaaccttctaccacacattttctatagctagcaatcattttaacacatacacaaatgtgcacacacatgcacaaacatgaatgtaaattatatatcctcttctctcaggctaattactgaatttactaaggtatttatttatttatttatttatttatttatttatttatttatgggacagggtttctctgtagctttggaacctatcctggcactcactctggagaacaggatggcctcgagctcacagagatcagactctgcctcccgagtgctgggattaaaggtgtgtgccaccaacacctggactacggtatttatttttaatgggtagtttgccaaaatcttctaggttgctagtgaccagggttttctttagttcctaggactacaggccccacaccaggatcttcccataaggactaacttagagagtccaggtactgcagtgcatgcctataatcttagcacttaggaagtggaggcaggagaatcaggagttcaaagccaccctcggctatatagcaagtcccatggccagcatacataagtcaatgtctcaaaaaaaaaaaaaaaaaaaaaaaaatcaaaaccaatcaaccaaaaaacttaaaaggggaattaattcaaacattgaataatgtcaaaggcagtgtccttagactagattagacatttggttccccattccatcttccctacaaccatttcctatctacttctgtatacaagatgtcctcatacccacaaaccacaatcatgtgcacaaacccataaagcatccctggtatgtcaggctcccaagaagcacaaaaagggactatagctgaacagtctctttgacattagggaacatttcacagaaatccaaaagcaaagccatcctaaagaagaaagaacctcagactcagggcagacattctttcaccacagctgtccagaccggcatctgcaggcaagcacttacccccataactctgcctcgctgctccacgtcttcccacataaaatggactatgatccggcacatgtattttccagaccggccttcctgcttcattcggactagacacatcctaagtggaagcaaaaagagtcactgaataactgcattttttttttcacacagttcacagaaaagagattttagcacagcatatggaatcaaaattcaggagtgaccttgggtctttaacacagtcacagtttaaaaaacaaatgtccatctgtgcagtgaaaaaaacttgcgctgggcagtggtgatacaagagcacttgggaggcagaggcaggaggatctctgtgagttctaggacagcctggtctacagagtgagtcccaggacagctagggctacacagagaaaccctgtctcaaaaaattaccaaaagaaagaagaaaaaagaaaaaacttgcatattacatatgataatgaaagcaccattgaaccagggatacctcaaaagcctccttcccacatggaataaatcctatgtggttattagaaagacaatcaagcagaattctccactcaactggggaaaatatttgttcactactacagaattttctaaatgtgggtaaagaatttcctgtctcgtatagtagctactagctacttgtggctactgagcactttaagtatagctactccaaggatttcaaagatatagtaagaaaaagaatcacattttaaatattgctgtcacattgaatattatttcatataagtttaaataaaatctatcattgaattaatttcaggggctggaagatggctcagtgaagaatggagttagaatcccagcacccataaaaagacacgtatggttgggcatggctgtaactgtaccactgggggttggagacaggtggctcccaagagctccctggtcaggcagcttagcccaaacagtgagcttcaggcccagagcaataggaacccaacaccttcctctggtctcccatagtacctgtacctgagcattcatttgcatgcaccccctacagccacaccctccacatgccccacacattaaaaaaccacctttcttttcaaaaccactctcatttctttttactttaaaaatgtaactccatatgtagaaaattttcaattatatttgtggcttgcattctacttttcttggccaatatttgttcagtatacagatcactgagaatattatgatcacatttttataattatcaaattgttctcccactagatgtaaattccattgaaggcaaagatcaagtttgtttttgtttgttgttgctttgttttgagacagtgtctcagtatgtagccctggctgtcctggaactcactctgtagaccaggctggcctcaaactcaagagatccacctgcctctgcctcccgagtgctggactataaaggtggacatcatcacaccaggcaagaattatgtaattttgttttgctttgtttttcaagatagggtttttctttattgctttggaggctgtcttggaactcactctgtagaccaggctgacctcaaactctcaaagcctctgcctcctgagtgctggattaaaggcatgtgccaccaatgtcgggctgtaatttttattaatttaaacatatatttaggggcaggagagatggctcaatggttaagagcactggctgctcttccaggagacccaaattcggttctcaagcacccaatcaggtggcccaggggtaccccaggcttctggcctcctcatataccaacactcacatgcacaaacccacacatgcatgtatttaattatacaaaagaatataatcaaggttactaacttttcaaagtagttcctaatattcttatgaccatactaatttctaatgtcttgaactaggtattaaatgactgcaacagactagtcagctgaaagacaatccctgctataatttcagaatgctataatttatctaaattgacaagtctatctccatacaaaagctgcccattaaaatcaactaaaagggggctgaggagatggctcaggagttaagtgcatgcctgtggggatctgaggatgtactgagtggataaattttgacacaggaatgtccacatctccagaatgcccaaagccacagacccatgagaccattggtaaagctgttaccagtatgaacaggctcaagagaaatggcagagctgttcttgagagtcaaagcatagatggctattggtattgcacaaagattagcaactgcaacttcttcctcctgaacaccccgaaactgctctactatagagacctcctactgagactagctaaccccttcccgggtgctgtacctgataaacacactgatgttctaggttgtggaggtagcagttgcattagagaagcccgcctgatcccaacttcactgtacaagtgtctgtctgttcttcattcccttactgccactagtagcatgcatgcactgccattgcagagaacccaaagtcagctcatagctccaacagcaggggctcacagtggcctgtaactgtagcaccaagggatctcataccctcttctggcctccttgaacacccacacacatttacataagtaaaaataaatctttaaaaagaaaactagtcacaagcagtggcatctgcctctagtcccagcagaggatctctgtaaaggccagcctggtccacatatcaagatcctgcctaaaaaaaaaaaaaaaaaaaaaaaaaaaagagagaaaaagaagaagagggagggaggagagagagagagagagagagagagagagagagagagagagagagagagagagagagagagcgagagagagtgcaggttcatgcttagagcaggctatagggggcacacataaacaaattccagtacgcaggagacaagaaaattgcaaattcaaggccagcctgaactacagagcaagaccctgtctcactatgctgctctgtaaaagaaaaatccacaagcaacaatggaatgattccaatctgacttgcctcaacatctctatgaatgactaaattggaaaaagaaaacacacttatcaaatgggcagatgacaagctgggcaagagaacaaatatgctacatgacccaaccatgacccaaaaatatctccacaagtctgtctcaatgggatgcaccttacaagaatctgaatgggggtggagaggtggggaaggttctgtacttgagtctagtggctaaaactccagaggtccagaatacatgaatgacacctaccaatgtaaaaaagcctttaaaaatgaagataatagaacacactcagtgcaagtcaaaagaataatgatgctgaccccaaattaatgttctagatacaattgaaatatgccctcaatggcaaagtgagactccaaatctgcttggaatagcatctactaattctaattttgaacatcattatctgaagaggtgaggttacagttctgttctactgcacagcaatgagactacaataacaataatgaaatatacttgagaatggccagaagagaggattttaactattctcactccacagaaataatatgagatgatggccctggtttgattataacacaatgtacacatgtgtcaaaatattgtataatttataaatatgtataatgatgggccaattaaaattaagaagatgaggaagagaaaaaagatgagtgagcaggctggcaaggtggaaaaggcaattgccacctaatcctggtggcacatccagcagcaagtatctaaagatttaagtaactggatggacaacttcaaaatgcagaaaactagctttttcacataaggagaacagatgtttggtgtagatgaagctttttcattattatttataggcagtgtgggcagcccaagttgagtgctgggaaccaaattcagctcctacaaaaaagcagtgcctcccttaaccactgagcacctccgtaccctgagcagttcctcccgtaagcaccgagcatctctggagcctgagcatgcagctttctaactaaaggttcactactaatctcaagtggatttgttggtattttcattctaatttttagcctctgaacccagttcataccaaaaatataagactttgagacaataatgaagaccgcatgataatatacaatagggagcatatttcaaagtagaaatgcactgagttaagttcaacagcactttctttataagacttttctaaaagttagtcaaattgttcttgtcagcctttcacctgaaaatgtgcaatgtgttttgatgcttaagtgtcataggaggccaattcatcaacagcaatagtgaggtaatggaattcttcatttatttgaaaattctgttaatacacctgccctctggggtttaaaaggcacagattttttcagaccataaactttctaactatatcaacatgcggtgaggtgttgtttggggtttcacagcacagcttgttctataggcattataagataatggttagcaatgacattctatgctggagagaatgtggagaaaaaggaacattcctccattgctggtggaagtgcaaacttgtacgcccactttggaaatcagtatggcagtttctcaggaaaatcggaatcagtctacctcaatatccagcaattactctcttgggcatatacccaaataatgcatgttcatacaacaaggacatatgttcaacttttttcctagaagtgttgtttgtaatagccagaacctggaagcaacctagatgcccctcaactgaagaatggatagagaaaatgtggtacatttacacaatggagtactactcagtggaaaaaagcaatggaatcttgaaactcgcaggaaaatggatggaactagaagagttaccatcctgagtgaggtaatctagtcacaaaaagacaaacatggtatgtactcactcatatatgaattttagacatagagcaaaagattactagcctacaatccacatcaccaaaggaattagaaaacaggaggacccaagagaagaatgcatggcctcccggagaaggggaaggggacaggatctcctgagctaattgggagcatgggggtaggggagagggagctgggagagaggggagaagaggcagggagaagaggaaatgggggagcaggaaggctgagtcgggggaagaacagaggagagcaggatgagagataccataatagagggagccattataagttcaaggagagatatggcactagggagatttccaaagatctacaaggatgacaccaactggcaatctaagcaatagtggagaggctatcctaaatgcccttcccctataaagagactgatgactaccttatatgccatcctagaggcttcatccagtggctgatggaagcagaggcaaacacccacagctaaacactgaactgagcgttggaacccagtttcagagggggaggagtgatgagtaaagaggtcaagaccaggctggtgaaacccaaagaaacagctgacctgaacaagggggagcatatggatcccagactaatgtctgggaggccagcatgggactgatccagacccctgaacgtcgatgtcagtgaggaggcctcggcactctatggggcctttggtagtagtaaatcagtatttatgcctggcgtatgaaaggactttgggagcccatcccacatagagggatactctctcagcctggatacatgggggagggcctatgccctgcctaggacgttatgagagactttggggatccccatggagagtggccttaccttccctggggagcaaaggggggatggagtgggggacaaatggagggtgggggaggaggggagggagagggagcagggattgacctgtgaagcagacttgtttctaatttgaactaataaaaaaataatttcttggggaaaaaaagattaatggttagctcaatagtcgtctgtgctaaaaagataatacaaaatgaaggtactctcacactgactgactacccaatgaacagatcctgagctcctactgcatgtaggtaatggtagaatgaccaggtattacagtgatggcaaagacatgagtccagctttcaagctgtgtgtctcctaggagaaacaaaacaaggcacatacaaacaacagggaaaggtttaataagatagctcagtgggttagggcaattgctgccaagcctgactccctcaaacccacatggcagaaggagagaactgattcctaagagctgtcctctgaactacacaccatggcacatatgcccacatgtgtgcatacacacaataaagaaataaataaacaaatgtaaaaaaagaaggcagcatctcaaaacatgcaatggagtttgaaagaacactttgggatgaataggatctgaagaagcttgacgggaaatgaaacattatacctgaggcttgaaaggatgggctgaaatgaagatgcaacaaacgtcaagaggcctttccaaaagacaggcacggagaacaaagccagggccatggaagaagtcagcacatgtcaaaggaacaatgaatacctaaatttgtaacagggtagagtatgagaaggaggaaagtgaagccagaggaatcctgagtgactctgtaatgtcatgcagagaaaagtctgaacctctctgggctaagcagtcaacccagagccactgggagaaaaaaatgtgaagagattaccacgttggcactcagagcagaagagtcactgagacgttagctcttattcccagccttagcccacaattaaacaccaacatcaccaaggttggaagcaacaaaatggaggaagtctttctttgtggaactgaggtctttgtccagtctgaaaatacaaggttgccctgccttttgagagaaatgtaaacagcgacgtttgttttaaacctctatctaactttggtgttcctaacagtttaggaaatagtttagtattgacagctatcaaccaaaaaagagaaagttcaaattactcctaaaacactgcatcaaattagttcagtggatgtgtgaccaatgcaaagcacttaacgatataaagctcaacagcaaatatctccttggaagaccaagaatcagttttcctctcagcgtatgtgctgaaagttcctgtgttgtaaggaaaatgtaagattcagaccacagggccctccagccactaacactaactaaaagttcatcaatgtacaccctgaggtcatgaatcaaactctgtaaggagctaagaacagaagaaaactcccattgtaaagaactttcgttcttactctccagaaagaaagaaagaaagaaagaaagaaagaaagaaagaaagaaagaaagaaagaaagaaagaaagaaagaaaagcagagctggagaccacacctatgtggtaaaacaggcagctgcctaggatgtccaatgagcagttcaaggccagctccttcaaggtagggtgctaccttgaagctcacacatattcaattctgcttcttcccctgcacagtaactgctttgaacagataacacacggaaggaaaaggaagacaccttcctaccccttcccaagcagtcttcagctacagcaactagctccccgggagtccttccatataatcttatcacacacagttccagtgtccaagtcttcctttctatacatggcagtagcttttcctttcttcaccttgctaacatctacacacattattctgacagtgagaagcaaagaggagaatccctggaagcttactgcccccaccccccagcctagcccatgcagtacaacatccaggagactccaccttaaacaagatggaaggtgaagaccaacacccaaggttaccctctgacctccacataggcaagtgacgtgtgtacacaaacaaacataccaaacagttagagtagtatctgccacaggcggaactcagcttatctggcaatttttaatattctacaaatgactaagaaggaaaaaattaaatagcaaaagagaaaaaaatgctataataaacagccaacactgctccatactaagccccctggctaagcgctgtaggtgcatttctttcttgttttcagagttttgttatcctatatacctcaaactaccaccctgggcatgtagcttacacctgtaatcctagcactcagagagactgaggaggacctccgttagttcaagttcagagctagccggaaccaagttccagaacagtctggcagaagtatgagactttaacacacacacacacacacacacacacacacacacgggtgagacaaggaccctcctgtctcagcctctgcaactctgatgctcacactgtctcaattccactgttgaaaaaaactcacctctgcatctggggttggagagacagcacaacagttaaaagcacttgttctccagaggacctgggttggattcccagcactcacatggtaattcagaaccatctataactccagtcccaggggatcagatgtcctcttctgacccccaggagttccaggcatgcacacggtgcgcagacatacatgtaggcaaaacatggatacacttaaagtaagaatactttttagcgaggcggtgatggtgcatgcctttagtacaagcatttgggaagcagaggcagatgggtctctgtgagttcaagggcagcctgatctacaacgtgagttacaggacagccagagctacacagagaaaccctgtcttgggggagggagggacttaagtgacttttaagaaaggaagaaaaaaaaaaaaaaactgtttagagcagtaatccctccaacaatacaaatctagtgagacctgcacctagaattatactgaggcatgtttgtttgcctccttcactgaccacaacaagccctccagaatctaccaactcaattttcccttgaatctttacaggacacactttaagttttaaaactagcatcacattagaaaaagcatattggggactggtgagatggctcagtggttaagcacactggctgctcttgcagaggaccagagttgagtctcagcacccacagggtggctcagaatcatatataactcttgttccgggagacccaatgcccagatacaccagatatacatgtgatggtacacacacaaacatatgaacacaagcaatacatttatacacataaaaaaaattttaaaaacatttttgtaaagaaaaaacatatggggaagaggagagatggctcagtggttacaagcctactcttcaatctgctcttctagaggacaaaggttaagttccaacaaccatgtcaggtggctcacaacctcctctagctccagttctaggggatacactatctctggcctctgggcatacatgcacatgtacacacaccccacacacactttatacctattgaaaaataaaaatctaaaatccataatggaaaaaaagcacactggaagggaaagatgcctaaactgatacaaacctacctataagaacaaaagccactcttggaaaggaagaaactaaattgtactaaagataaatacatacccaggtatgacattgcaagcctgtaactccagcactggagagaccggatgaaaaaagacactaacaccctaaatttgagggcagcctaggatacacagggaaaaacctgtctcaaaaagcaaaaaggtagatgaaccgacacccccaaactccaaataaaccaattaatggtaaacagaacagaataaaactaccaagtgagattcaaagacaaaaatacaagctggaaggtaaagcaaaattaatgaaacaaattcaaaatggctcatctaaaaaactagacgattctagggcctactctaaaacaaagctaatgtgtcacatcctatgagtcattatgagctagtcaacttccagaatactaagtttacacaaaagaacctaacagctgaactccaaccttaatcgacactgtgaatgtattcctcacactaatgctcatcttttttcttttcttttcttttttttcccccagacagggtttttgtttggttggtttggtttttccagatagggctcttctgtgtagtcctggctgttctggaactcactctgtagaccaggctggcctttaactcacagagatctgcctgcttctgcctcccaagtgatgggattaaaggtgtgtgccactgtcgccgctgtcacccggctttttagacagggttttatacagctcaggctagtcttgagcttcttgattctctgctttcgacttccaaagtactgggattacagccctgtaccatcacacccagatcttatgttaaattttgaaaagggctcttttgggggaaggaaagcttacagactaaaacaaaaattatcctcatgaatgcaaagaaaattcttaataataaaaattcttgcacttgcttcacaagtccttatgcgcacctacttcgcacacaggctgagctgcactgctctacagggattctacacactcctcccaccgtcactgatgttcttaaacccacaatttattattgaggttttacgcctcagcactgtcctgtctctcagtgattccagtggctcataaataatcctgatctcttttacatataaggaaggcaaacaacccagctagcaaagtaaagaaaaaaagagtgctcaagtcttcctgacggctcctcatctctgtaaaaggccaacccaaagacggccaaagaggaaaagctcgctgagcatgagtctcagataaaggactaaagacactgaccgcctcatgctattaagttccgcaatagaagacttcatgcgtctgggcccaccaccttcctctatttgcacaattacacatctggtacagctctctgcatttcacagaaaaccaaggtgcttaagtaactaaggtggcacagtggagctgaagcatagctagagctttccccaagccagtgtctctaaattagctcttcaattcagcgatggcccagcaccagtggcctcttcctgctaggacggcatccctgtctgcacagtcaaaagcaacaagagcctctctctctcctctcgagccccggagcaaggccacagctcttctcaacatctatccaaagggtagggttctttaggacttctgccacatttgggcagcctgtcgcactcagcatgtttagcatttgcccttgtttgaccacataagctgcttttaaggggatctgattctaaattcagtatcagtgggcaggtgagcaggtctgtcacactggctactatgaagaaatctcaagtggaactttcctagagcttgtttgccttacttagcatcagctaaggccataaaagccaggccagcatggccatgatgatgccccttagattgctaatgaatggtttatttattggtgagctggcacactgacgctttcctggggccatctctaccttgtttctgaaacttcccccctgtgaagtctaagccttctagggggagcacaggagccaccagacttgtcagtagcaaaagataagtgggggcaaaatgcttcctgaaaccatcttcactaaacatataacttggttggcttggcaagtaccagggcactaaaggtcatgtgtgctggtaaaaggcagccgcgtgggcctttggtttgaacaaaagtgaaaaacaaccacctatacttgtgggggtgggagcaaagactctggctgggggcaggagaaagaagctgtgcacatggccaggacatatcgcaggtctcaagctattggaatccagcagggccaggatgccctacagccacgtgaaagctgctggggtgggtttaaagaactcctcgaaaatgcggccagtgcttgtcaggcaggcctctggccacactgggatggagaaagaatgcttcccaaaccctttcccacccagtttacttcctcttctttacaagtcttctcatctggcttctctaatgttcagtctccatctttctttggaacttgaatttttaaaagttacttcttcctctactcactgctcaggccatcctctggctctcgaccccagaaggccaacaattgctgtccttaaccatctaccatttccagggattaccaggacacagacagtgcataccaagaaaggcaatgctcactttatagctggcaatcactaagtcatttctattgctattcacattcaggggacaagacccctatcccctagggacactaagggatgaacagctaacacagtcagctttggctttgtctcagatcctccactgctgatgtggaacatgaagtgacctgtgacaaatatcataaaatcaccaaaaccacttctctttgtgtaagacaagggaactgaactagatacatggtttttaaaactgccttctgggttcccatgaagctaccttcaggttccttttctacaggtatgttatacagataagaagtgaccaggtcattcccacatccttcaatccaagtagtagtcctctcatccacttacatagtatggctaaggatgagatttcctgtgtgtgtgtgtgtgtgtgtgtgtgtgtgtgtgtgtgtgtgtgtgtgtgtgtgtgtgtgtgttgcgaaaacacacacagggcttggcatttaagagtgcatacggatcttgcagaagacctgagttacagaatttcaaaaaatgtacaatgaaataaccaacaacaagatttataacttgaatttaatttaaacattacaaaatgatggggggtagggagagtttgagactagaaagatggctcaatggttaacaccatgtacaaacacacacatatataaataataatattggtttcacttttgttgttgtttacacagagtttctctgaatagccctgactgtcctagaacttgttctgtagaccaggctgacttcgaactcaagagattcacctgcctctgccccgcaagtgctgggattaaaggtgtgcaccatcaccacccagctcacttattgtcttagggtttctactgctgtgaagagacaccatgaccacaacacctcttataaaggaaaacatttaattgatgcggccactttcagaggtttagtctattatcacggcggcgtgcaggcaaacgtggtgctggaaaattctgcatcttgataggcagacaacaggaagtggtctcaggtactggatgtgacttgagcatatgagacttcaaagcccaccctcacagtgacaccaactccaacaaggccacacctacccaacaaagtcacacctcccaatagtgccactcatctggggagccattttcttccaaacatccgcattccactccctggaccccaaaggcttgaagtaatatcatagtacaaaaatgcattcagtcaacaaaaacaaaacaaacaaaaaaagtcaggcattgctagcacatgcctttaattccagcatttgggagacagaggcaggtggatctcagtgagttcaaggctagcctggtctacagagagattgccaggatatccagagctattacacagagaaaccctgtgtcaaaaaacaaaacaaaaatgcattcagtccaacttcaaaagctgggcattggtggtgtacacctttagtcccagcagttgggaagcagaggcagatggatccctgtgagttcaaggccagcctggtctacagagcaagtgcctagataggctccacagctacaaagagaaatcctgtcttgagaaaaaaaaaaaaaaagtccccataatctataacagtctcaaactattcaaaagtctaaaattcaaagtctcttctgagactcatgcaatctcttaactataatcccctgtaaaatcaaaatcaaaaagcagatcacatgattccaacatataatggcacaggatacacattaccattctaaaacatagggaagggagcatagtgaagaattactggaccaaaccaggactgaaaaccagttgggcaaactccaaattctgcacctctacatctgatgtcaaagcgcccttcagatctccaacccctttcagctttgttgactgcaacacagttcttcctcttgggctggtgtgtcatcccccccccccccccaagcagctctccttagcaggttccccacagctttggcatctccaacatcttgggagtctccaaggcaagccaggtttcagcttcacacaatggcctctctaggtctcttttcaggaacacccctgacacaagcctggcctcagcagctttccttagttagcctcagaggcaaactcctagcccctttcttctatccttaactctagaatcatgtggctgaagctaccaagttctgttgcttactggggctggaacatggccccctcattcaatcacatcatcaccaactttctgttttcaatggttaccttcactacaaatgcttggctgttctggaactttctctgtagaccaggctggccagcctctgcctctggattgctggaattaaggggatgtaccaccacaccctgctttaagcttttctttaattccctttctcaagttggaaatttagctgggtgggatcttgcccctgaagttaccactccctttatttcatttcttaatctgtttatctccttgaacacaggacttagcgccattccacttgctggtgctccttttctcctcaaatattttttccttgctcagcttgttccttttcattataaatcttcattagagttaacatcagtacccacacaacagagtctgtattggggtgttttgagattccctctgccaatggtattaatccaaaattttcactttagcctcaggcagagttttcagacaagagcaaaaagcagccacattcttcaccaaaataccacaagaatgatctctaggcaacgtactaaaattcttctctgaaattcttgagccagcaccgccacagttcatctgatgacactcagcatcactgtcttccatggtcccagtatggcccattacgaagcacttgaagcattccactgctttcctaacccaagctcccaaagtccatattaccctaaataaaaacatggccctcccatcacagcaatgccccactcctagaaccaacctctgattgagtaagggtttctgttgctgtgaagagacaccatgaccacggcaactctttttttttttttttttttttttttttgagacagggtttctctgagtagctttggaggctgtcctggaactcactctgtagatcaagctggtcttgaactcacagagatccgcctgcccctctgcctcctgagtggctgggattaaaggtgtgcgccaccaacgcccggcatttgtttgtttgtttgttttttggttgaccatggcaactcttataaaggaaaacaattaattgaggtaacagtttacagtttcaaaggtttagtccattctcatcatggcagggagtatggtggttagaagtatagaggcacagacatagccctggagaattctacattgtgataggcaggcaacaggaagtggtctcagacactggacatagcttgagtatatgagaccttaaagcccacccccacaaagacacgtttactccaacaagaccgcacctattccaacaaagccatatctcctaacagtgccactccctttgggggccgttttctttcaaactaccagttattataatattattaagacaaagggtgataaagcaggatatccaaccctctcctttggtctctgcacatataagcacatgtaggaggacacaaacacaagttatatagtgtacatatgtatgtattgaaatactatacagcactccattaatatgtataatttttatgtatcagttagattttaaaatggaaagaaacacctaagggccacagaactgccttcagagggaagggaaagcttacgatgacaatagtggcttaatcagatactgaggaaagaagatttgtccagctgtgagaatgataaatacctccagaataaagactccacagaacagtagcagacagcagtagtaaaagcatctttactactggctgaatcttacagaacatgaacaacacactaagaaacttgagagccaaggtgggaatccaggtactggtgggtgcaccccaatgaaataaactcagtgggagaaaccttcaacttctgctaaaattagttccaatagaataggaagtatcagacatttcctgacattgcaaaacacaaggtttatttaatgtttgcatccaatactacaagcatgcatactgggtcacaaagtaaaattaatttacttctgtgagctcagggtcaagagtttgagctaggcaactaatgactgactgaccaggttaaacaaatgaaggacatatcaaaaaggaactcccggtttctggtacaggtatctgaatgggctcacaatgaatggctatatcaaaaaggaactccgggattctggtacaggtatctgaatgggctcacaatgaatggctgggataaggaaagttaggagggctgctttaccaagccagtgtagggatgctagggatttccaacagcatctttttcagcagccacattcaataatgatcgtgttcagcagggacaagggacacagtcagtgccactgcaagctcactgaatatacaactaacagaggtcttctaggaacacaagaggtatgtggtcttaaatctcaacccactgaaaaactatggaaccagaaagagtagacagacaggagaagtatagcatcttcagagagcatacaggatggctcggtatcctgttctatcccaactaccaataggatccactacctaggggacccaggcaaacattctggaaagtctatcatcagggcactttcatttcctaggagtctctctggttttgttttgtctttctttaggactgtttccttgtctcctctctcagtttccactccaaaaggtgttatagtttgtattcctccagtggcacagcttacttcgatctctaaattggagtttggctgcccctcagtttggactcttaggaaagggagttctccaattctgggaagatcactacacaactgtgtaggggacagtaagccacgcctgttagaggcttgtgcctgaccacacctgtcaaggcgtggtcaaggtgaggtcaggatgatgcaggatgggctcttaaggggctgcagagcacatgggaacccccttctccctggcctcgctgctcggctgccctgggcacgctctggcttgcgtttggctggtatttatctcaataaagatatctgaccttacggactacggatcatctattgtggtcacgcaatacaactgagcccaaaactatttgtttgtttgctttttgtttttatttctgtagacagggtttctctgtgtagccttgactgtcctggaactcactctgtagaccaggctggccttgaactcgaagagatattcctgcctctgcctcccaagaatgtggggattaaaggcatgtgctgccactgccaccaccacctggcttttttttttttttttttttcctcaaaaactacttttctggtcaccctttgactacattcttccacgaacctgtcaccaaaaatgtcagccaactggctgccctcaaatacctgcaggtgcagtctttccctcctgctgctcttcagaagcgccctctctttctaccacagtcattttacttactcctcatgatctctatccctcacacattagctctgccctacactgtcctcactcctgccactgaattcagacttagttctacctgtgtgcttccacagcacctctttgggctttgcgccaaacatttcattagcatctattatagacaatagcactcaaagcccttttccaatacagtttcttgaatgtgtgcactgtatcacagcttctctccagcaccccatggtcccaaacacacagtaggtccttgacaaggattttctgactcaaacagacaagatgttctaccaaaacctatttagatcatggcaattaagagcaatgaagagacgtggcaggcagtggtgcgcacgcctttaatcccagctctcgggaggcagaggcaggcaggtctctgagtttgaggccagcctgatctacagcaacaaagagaattccaggacagccaaggctacacagactctgtctcagaaaactacaaaggaaggaaggaaggaaggaaggaaggaaggaaggaaggaaggaaggaaggaaggaaggaaggaaggaaggaaggaaggaaggaagggaggaaagaaagaaagatcccctcttctacttagctggtggtggtgcaccccactcctcactcagctgtgtgtggtggtgcaccccactccttacttagctgcgggtggtacactccattcctctgaaaagttaacttcagcaagaaaggttgagtagacattttggcaagtttaaggaaatacaaataatttcaaggttctccccactgctattagtcaggtattgaccttgggatgtggttgcagggattatatattttactttgccatccacgccctctgccactctgatacctctagctatatgggcaataaagagtctttcatacaggctctgaatattatctttgagctcctctgggaacaacttagccttctctcaaccctcccacctttccaatgagtaattctaccatacagtcctcagctctcaaaaaaagtagttttcttctcaatgtatccagtttccctccctgtaccctcgccttaacctccaccatggacaccaaaggcagactgtgccttctcagctgcctgacaagaagccacagtacatatctcagagaagagaactaggaagggtctcaacactgggagcgtcctattcaatcctataagcaccatttacatatatccagaacctagcagccctgtttataactgggcatttatgtgtcctagctccctcactaaaactgggcttcttgagaactagccctagttcccagcgaagtgcccaggacatagtgtaccttctataaactaatgcttcagagggttttaaaaaaaatccataaaataaattgccccttcaggctccctagccaaactcagtgacgatgtgaatttggaagaagaaacgtttcagaggtgattataactaaaacatctttatatagtagccaggcctgtgatgcaaagctcagctaaagacagtctcaaacaagggtcctttgatgggcagccattccccacgttccttggactgctcactatggtgaatgtagtaaacccagttctccagagtttactttcccaagatctggcaagtcccccagcccccactttagtgactcctatatccccctttgacctttaatgctgtgtaacagtagatgaaaatcgattttttttttaaggctacttcacatctgaagaaaaaatatactgtttaaggtgttaaatattttcatatgcaacaaatccagcttgactctaacctgcacacacacttagaggcacagacataaatgtcagtggtaaaatttgttataggtttctgatgaccagagatggaaatgaccacggattctcacaattcaaaccacttttacgtaaatgtgaactttcctaaaacacccaaggggagaacttttccactcgacctcagagagtctcttagagatactgatagcattattcgtggggttaggtgttctttgaaaaaaaaaatattacaaatattggtttcttttggggtttatgctttgacctttaacaaaaatgtgcttcaaggcaccagttatgaaaatgaaaggagcaggttttcatgcttaaacaagtaccacttcatataatcaagactcaaagaaaactatacccccgccccccccccacatacacacacgtgcaattggtgacctcattcaaaatggctcacttaccagacatgaagcagagttataagaaaccatgagttgaatgtatcgggcatctgacaccctagaaaataacaataaagtgtaaatataagaaggtgcagaggaggcatactgactctgtgttagccactgctgggaatgtgcagtatggccattctgactatgctattgcagaaaagatcagtaaaaactcaatgtaagaccatgggctagaggacggaatatagccagacaaccagccttccagttccaaccttgttaccgccttgtggccttgggcaaactgcatcttccctctgagtctcaaacacctcattttacagaatgtgacagagatgatttcttatggctccttccaatgccatgagggtctaagctagtttccctttgtgggcttgaagtctaaagagttaagcatgtacacctgttccccttcagcatcagctactgtgatcatctgaaccctgctgaaaaggttaagcctttctggtctcctttttttgtttgttttttgaggtagggtttctctatgtagccctaactgtcctggaactcgctctagagaccaggctggcctggaactcacagagatcctcctgcctctgcctcctgagtgctaggattaaaggtgtgcacgaccacccccagctcttttctaattttttaaagataacccaatatggtatagccatgaatgtgctgaatgattgattcacccaaataagcaggaggggaaagtggaaccctaggagccagggctggattgggaagtggactgcacccgctgaaaggcagtcctcagctacagggacaacactggacagggcctctcagctcagacacccacgcttctccagtctcagatttctaagaaatccctctagctggctgaggggtccccactacatgtactttccttatcacacagcaaggagaaaagcttgacaaggagcaggaaggatgaaggggagaaatttgtggggaatatggcccttatggtaaaaccatcttttggaacaatgactcaaaaataaaagtaaggcatgatagtacctgcctagaattccacacacatcctgtgatcttgtgaggcagcaggattgcaaaatccaagctagcctggactgtattatatctgtatccctacccctccctcacaaaaaacccaaaagtatcctctgcccaatcagcattcagtgaggtaacagttaacaactgtcactaggagagaaaacacactgcgaccctaggagggaagactacaacctgcactaataagggagtcctagctcactgaggctgggctcataacatgccagacatagtaagtgcttcacagacactagctcaatgaatctgtctaacaacccgagtaggtgggtactgatatatccccagtggaccggtgagaaaactggcagtagtgtcttgataacattctcatcaagacaattgctcaaggctcctgaaccacaaacaacaagaactgagatacatgggattaaattcagacttctttgattctgtgtacagtgtgtgactgctacttaagcacatctaatgctaagatgcagacccttccttgagaaagtgtcttactccacacccaatctgctgctaatcatcataatacagtatttctcttagtcctttccttaacccgggagaagcactggagtcaaaagagccaagtaactacgggcaagaacatgttaagccagggaccaggctcgggtttgaatccaggtctgtcacaaaaggacaccaaaacactcgggtgagcttactgggtggtacccagcagctgtcaagtggacttcctctctgaacccagcaggagggagctggagactggcctggccagccatccagctattgagagccatgccatctgagagccggccagccgctctccgcctagaacaagaatagccacgagaaactctcaagcccagatctcaagttgggtcttttttttggatgttagaacaaaacattaaaaagaaaagttttcttggaagtctgtttttcaatctggagaatgaaatctggctgcttctacaagacagtctgcccaactgctgcctctacatcagagcttcccagcagcctccaggagcctgtccagtttcctaagaggtggaatcagttcttgggctggaaagcacagacagacaaacaggtcagcagctggccctgggtcacagttttcccttctgggggtcagctcagggctgatgagaaaagagttggcacatgagtaagtcactgtgcccatgtaggacataacagaaacccacagagtaaacctcaaaaatatcaaaccaacgactgaatgttgactatgagcaacataaaaatacgattcttagctcaacaagatatgtttacatacttcagggctaaaccctgtgacactctgccatgctcatactcttgctcatgcaggatattcttttctaaggctagcctctttcttgacaccaggtttagtaaaattaaataattccattattgtcaccagagagtgatattatcatattttaatatgaggtcagactgcttaattgaattgatttaatttaagccgatttaggcgaagtttctgggcttcttggaggcccagtttccttctgtcaaaagtcagtgggcagaacaagggggcctatctgagagcttctgtgattataaccaatagattaaaggcctgtaaaatgcttagtaaagccaggtgtgatggcgcatgccttgagtcccagcaccagcacttgggaagcagaagaaggtggatctctgtaagttagaagccatcctactctacataatgagttctaggcccaccaatagtatataataaaactctttcaaaaaaaaaaaagcttaacaaaatgattgccatttaaaataacgcctcaatattcactattgttgtttccactgaattaaataatagggctcaaattatctttgaaaagcttcaccagttaaaactgtgtcacaaagtagaacgaaacctcaaccactggctcagaatctcttcattaaggagcccctcctctctaaggtagtcagtttcttaggggcaaaaagccacaaacaagattgcagaattaagcacaagataactgcggcctatgctcctcacacccgtgagcaaaccacataacacagcaggcatgttcattatgacaggcaagggacattaccagagcatgccagagacagcagatgccaaggtgtctgaccactcagatgcatctagcgatctagatctcagcggtaatgacatgaggtctacactctggcagtgcagggaggactgtccaagaagctgacgggcacagcatactgtgtaacataacaactcgctcacacagtcttcaagaaatgtcatcagcctccttttgttggggaagaatgacatttgccacatgtttaaggctctgtcctcaggactctttctgcaaagatctaaagtggcgtggccactttaaaggtataatcttaggaagtgacatataaattccctcattttattccaatccccactaactccttagaatccaaaccacaagaaagtcagtctattttacagatttttctaaatctattttacagatttttgcctccaaatctgttctttgttcactagccacactttggaactcctttggtttgattttaaaatgtaaacctagacaaaaaaaaggggggggggcacagcagaacaaacaagccataggtttgcttgcttgtttgtgagtagaacaggttttccttacgtttatggaaatcttcatgccctgtcttctaagtactggaattacaggcatgtgccaccatgcctacttacgctataggtttatgtggtggtttccgttcggaagaggctctctctatgtagtcttagttggctgggagctcgctatgtagaacaggctggcctgaactcagaaatctgcctgtctctgactcccaagtgccaccatgcccagcccatgccataggttttaataggcaaatgcctaaataagtcttagaaaatctgaagggagggtgtgatcatcagaaaactcactgccatttatcctaaaggacaaagcctgggcaaaacgcaccaagatgcacactgttgtgtctgtgaacatgagtttccaacactagcacaatatctcccaaagggaactctctctcatcaaaataaaacaaacccaaattattaagttgcattacaatttccagtttgtggttacattcattcacgggcagcatgctacagtgggaaaatccctgaggtttaagccagacaacacaggtgcaaggcttggctaggcaatcttgggcaagtcactgagcctctttaagcctcaactgtttctaaacacaaaacaaaaataaataatacaagcacttactataccacaagattgtgaaactcctaaaggagacaaacatgaaagcaaataaatgtgagctattaatacgcaattgtaactttttgaaacttttcttaagttggtaatctgcaagctatgactgaaatatgaaaattaactatgttataacagtccattttgatactataatattaataaaactcaagaaccttcactagggaactagagagatggctcagtggttaaaagcactggccgctcttgcagaggacccaggtttgattcccaacacccacatggcagctcacaactgtctgtttgggaactgtagttccagtgtttccaatgccctcttctggcctctgtgggcactgactgcacgtggtcggtacacatacacaccaaatattcatacatgtaaatgaaaactttaaaaacagaggaaccttcatcaatgagtgacgacaagcattcatctaaaataataataataaatataaatcaagtattaaatatctgatgataaacttttgttttttcttttgggtgtgcatgcatatgtgtgtgtgtgtgtgtgtgtgtgtgtgtgtgtatgtgtgtgttgtgtttatgtgtattgtataggcacatgagtgagcacacccatacatgtgcatgcctagtccagaggaaactatcaagtgtcttcctctgtctctctacctggaagagctcaccattttggctgaccggcaagctcccaggatctacaagctgtcatctcccctcccccaatgctgaggttacaggcacatctggatctgcgtccttgcatggctcaagggacttgacctgaattcgggtattgaaataataaagaaaagacaaatagatacatggacacagacaaaaatgctgattcagttggactggggtcttagatagagaaaccgtaacacccctgaggctgtatgaagtttattacatagatttgaacagacacagggttatagcaaacacctgaacaaggaggtggagtttaaggcatgagtggctaagtcatggtaggaatagtctctgtattggtgcagtcatcaagctgtcaatttctgtggggagaacgatatagtggacattttctacacacaaggtcaacacttacacttggacccctgaggagagctctaccactcctctgagcctcctcatcccgaaaggctttgtcatcttcccatcagtctgaggatctgaggtccttaacatggccacgcccacgtcaacaacacaaattcactgaggacgtcactcactcccgacatggggccatgtacagcttcttccatggggtgcagatgcaaactcgggcctttatgcttgcacagcaagagatcttactccctagccttgaggataatgtttctatgggaaaagatacgatggtaggctggagaccttagcattgctctcaggctctcgtgtgtaagatccccaaattgcaaacaaacgtaaacaagcataaggtggatatgttggttttgcttgtttgtttttcagattatttacttttttattttataggtatgggtgtcttgcctgcatgtatgtctgtgtatcacatacatgccacattcacagagtccagaagagggcatcagatcctctggaattggagtgacaaatgatcatgagccatcatgtgggtgctgaaaatcaaacttaggtcttctggaagaacagcaagcgctcctaatttctgagtcatttcatgggctccagatataattattcaattgtttgtttggctttgggggggttgtttttaatgttactttctaaattaagtcatactaaaaaatcaagtaaactaaagcaaaataaaaaggtcaagggaaatgcacatggaattaagaaaaaactcaatattttctatatcatttgaagaaagcatattttctcattgtggattaattgcttgtataataagaaacagtttaggactggcaaatggctcagtaggtaaggatgtttgccaccaagcctgacaacctgattatgattccctagaatccgaatggcagagagaaacctttataagttgttctctgactctacatggtccccatgatgtgtatatgctttcacacatgtgcatacatgcacacatacactcatacacacactaaatgtctttttttaaataaatgtctttttaattaataaaaaactccttgtttacaaaggagcaaggaaatgatccttcctgatgaacaagaaaatagaaagtaaaaaagtaaattagaattataactcaatatagtattttaaatccctaatattaatctgctgaaatagtgaagtagccaaaacaactgatatttgagttttaaacaacccaaatagttattaagcaatcaaaactgcatctagccttgttaactatgtacagacatttgttgccagaggaaagcaccagctgtacaaacttgttaggtgcctagctctttaaggggatggctgctactgtaagtgcacagagtacaggtttccttttaacgtctgtggacacagaatggcttacatttattttccagtgaccttacaaacacctattttagttaaccattttaataattatagtttacagtaacatccttctggaaagcaatttatcgataggatgttagtattaaaattatataagcctttgagaccaataacccgctaataaaaagaagaatcattgttgcagaacatttgtacactgtgtgaagatgtgttagttgctatgactggtgtaaaacagatgaatggccaatagctaggcaggagaggcaggtgggacttcccagcagagagagaagagataatcaaggcagcatgctgaatgaatcggacacacaaaatgggagagaggtaaaatccacaaggtagaacatagattaataaaaatatggattaatttaagttataagagctagtgggttaagcctaagttaatggccaagctttcctaattagcaggtaagttggcagcccaaaggaaagtctaactacaaatcatgacatttatttcaggattaactaaaacaatcagaaactagacacaaaaagagcaatgactgacaaaaaaagtccatgtcaaatgctaagagagggcatggaggcacaagcctgtaaacccagccagcacttgggagacagacagtaggatcaggagttcaaggtcacccccagctgcacagcaagttcaagggctggagaggtggctcagtctatgaaatgcttggcatgcaaacatgatgacctcagcctgatccctagcacccatgtaaaaatacaggtcatgtagcaggcatagtggcctgtgcctgtaacccccctgatggggagacagagacaggagggtcactggagttcactagtcatcaagtgtagcctaactgtgagctccaggccaatgaaagaccctgtctcaaaggaggtagacagtgttttggaggaaaacaccacggtgaacctctgagctatatacatgcatggataaacaggtataacatatacacaaaaaacaaaggtttaaaaaaacttaaaacccacagccacaaaaataaacagtggaccgtttcctttcagaacaattgagagtcacttactctgaaagaattcctcaaagtcagttttctccacacagctcgtgtacatgcgtagggctgcgatcttaatcttctagacaaaaagaataaaaccaaactcaagacatgaccaagaggatgttctagagtcattaggtatggactgcagagctcatgtttcttcagctagaaggaggggtgtaaacctatctttggcgatgtattttgttttgctttagagaccggcccgcaagcagcccttgttgactggggatgggctctgtagttcagcttaccatctctacctttaaaaataaacataaatttttaaaatgtgaaccccgaaatcctttaatctttgctcagaggctctactaattagtctgtgatttggggggtggggtatgtcttttctacagactcacagaacatatgtgcataaacaaaattctctaataaatatggaatacttctcactatgcctcaagtactaaatatgaagaacttagtatgcagtactacatcttaagatcaaatctaaaaattataaatcaattctgacagagttgagttggtctgaagaacaaaccagtaaaacaaaattgaaaaactaaaccagtatataaactaaaaccagtatataaacaaaagacttgtataagtttctttttctttcttaaaattacagagcaagctgaacatagtggcccatgcctatgatcccagcactcaaagagttcaagaccagtatagtctacagggcaggttccaggccagtccagactatagtatagtatagatttttttgtctcaaaaacaaagcaaaacaaacaaacaaaaaaataaactaaagtccggtgttgatggcgcacacctttaatcccagcactcaggaggcagaggcaggcagatctctgtgagttcgaggccagcctgttctccagagcgagtgccaggacagcctccaaagctacacagagaaaccccgtctcgaaaaaccaaaaataaataaataaataaataaataaataaataaataaactaaaaacaggggctggatagatggctcagcaattaagagcactggctattcttgtagagaacccaggttcagttcccagcaaccacatggtggctcaaaaccacctgtaactccaattccaggggatccaatgtcttcttctggcctccacagacaccaagcacacaagtggtgcacagatacacaagcatacatacaggcagataaaatacttatatacataataaaaataaataactgaaacaaaagcaaaacaaaaagaaacattaaacaaaaggtatgatggctcatgcctcaaagtccagcacttaggaggctgagatgaatcagaagctcaagcttcatctacaagatctatctccaaaataaataaataaaaacaaataaatagagcccatcaagagttaagatataatacatcacaatcaaagagatttatgcataaatgcaaagttgaacccaacactggccaatcaaagaagggatgagagaaggagctgcctgtcaaaattcatcaagaactgcgattcagctaagcatgatggtgcatgcctttaatcccagcacttgggaggcagaagcaggaagatctctgcgagttcaaggccagcctggtctatagatcaagacccaggacagttcggggtatacacacaaacgctgcctcgaaaaactaaaacaaacaaaaaacaagaacacttaaccaggaaagtacaggtttaggaaagcactgagctacactattgctggcctagtgacaccctcatcctgacactttggactccagcagcccttctgtccttgagatgggaactttaggctcactcaacactgcataccaaatggagttcctgccacagatctaaatgctatggtgagggataaacaaaatgaacaagtatttctgccctggttgagtgtatggcccaggttaactataaacaaatttataattttaactaaaattcctagttacttaattcttgaccctccctaccatgcttgtagtttccttctggatcctctgcataaactcttcttaggtcacaactcatcactctgccctgggaaaggcagacttgtctccaaggcccagggctccaaatacatccatgaaaaagtattcattacaaatagtaactacttgaccagactggccagcatttttatacagtgctcacactgtggcaatcagaaacattttatagttcttcaattttcttgaaccaaagccaaacctttattcttgggtgagccattttcctggacaaatctctgaagcaagtccctgaggactatcactcagggactggaagtaacagctggaaagaatctctttgagaaccatgagttaacgtgagtgaagggaaggaggcagactgaatttccactcagtcaacacaagctgttccagtcctgggatgacttcatgtttatttcactctcactttgggagacttcacaggacacctaggcctactctcccacctgcctggacatgcgtaccctccaacaagatgaggggtgaatggggtaagaggattgtagtaacggctgggtaagagagagctgcacaggaaatttttctttttttttttttttttgtcgtcatttgaacttcctattctgtgctggaattttttttacaacattcttatttcgtgtttaataatctgagcccctattccaacaagaacaagctcggaagctcccgtcctcctggagggctctcatcatccactactctgagcacctcaggtgtcacgtcttccttcattcatcgttgatttgtccctcaatactaagagaactcacaatgccttctcttttctataccaagcatctctatttctttcaattattcttttttctattttgggggtgggattggggggaggttttctgtgtcccccctaactagcccaaaactgtttcacagagatctgcctgtctctgccacccaaatgctaggattaaagccctatggcaccattcatggttttcttcaaccattctttagttcttacacgatactgctatttaaacagaagagggggaagggtgacttctgagtggagcatggtggtgcacatcaataattattttcaacacttgagaatcagaggcaggcagatctttgtgaatttgagttcagcctggtctacatagctagttccaggccagccaaggctacacagagagaccctgtctcaaacaaaacaaaacaatcaaataaacacagaaaaatgctattttaggttgctcaaataagtaagaaaaggctacacttaaaatcttaaatataggctagggacattgttttatggtctatgattgactagcatgagaaagtcctcaagctagatccgcagcaataaagtctaaatgtgaatctataggaacctatacatgaaaacatccaagaaaaatatagccaaaaggtaagtcataagcatcagtagacaagtaaacactttgttctctaagcaaattcttgtgaaaataaaaacaaggaattttgccagtgcaagccaatgcaagtatctggccacagatttctgagttaacagtgctaaaaaggatttacctataaacctttaaaatggaaagtcctcactacattttcccaccaaaatcataccagaatgtgtcatactgtgatattttgatgtgatagattttaaaatgaaggctataaaaactgccacatcataaaagattttttttaatgtaaatatttagttgaggtaacaaagggaatcaagaaaactcagaggctaactcagctataagagagaattctcccactggtctcataatccttcaaatggtggccaatttgccctgaggaaactttaaaaaacaaaacaaaaacataagactagacaaagcatatggaagcaaccaagtggaacccaattactaagacatgagtaaaacagttaattttctcctctattctttctttatttccatttcacttttccttttttggggggaggggagtgggcagggtagcacacgcctttattcccagtagttggcagagggaggtggatctctgtgagtttcaggccattcttgtctagaattcacaaagatccatttaggattaaaggcatgttcaccactcgtaatttttaatttctactttttaaacagcagacatattttaacttttatattacaaatgtcataatcacaacttcttttttttttgtttgtttgtttgttttcaagactgggtttctctgtagcttcggagtctgtcagtagaccagactggcctcgaactcacagagaccacctgcctctgcctcctgagtgctgattaaaggtgtgtgtcaccaccacccggcacagcttctttttaaatacagggaagggccaacaagatggctcagagaataaaggcttttgccaccaagcttgatgatataaattcaacgcccaggatccacatggtggaaggagagaacagagttcccaaactgtcttatgacctccatacattctccaaggcaagcatgtggctacatacatatacacatgctcacttgtgctctctctctctctctctctctctctctctctctctctcttgcgcgcgcgcacacacacacacacacacacacacacacacacacacacacacactaaataaacataatcttaaaaattataaatgggccggaagtggtagtgcacacctttaatcccagcacttgggaggcagaggcaggcagatctctgagtttgagaccagcctggtctacagagctagttccaagacagccaggattacacagagaaaccctgtctagaaaaacaaacaaataaaaacaaaaatatatggaggaaaatctagtcatgatagtttacacctataatcctaacacttgggaagctgaggcataggactgctacaagttctagaacaggctgggctatagtatgatgccatgtttcaaaagaaaaaaaaaaactaaaatttaaaacagggagaaaaggtctggtcagtaatcaaatatatcaattcatcacctgtcaagaattttacaaacataaatataaaactttaataaaaataactaattccagtggtaaggaaagctaaggttggaatgtaaaatgaaacttaaaaaatttatttaaaaaaaggaaagaaaataactatttccttgaagttttagcagagactgcagggtctctaagaatatcactgtcacttagcatttgtagcctctccatatatttgaaaacaaagttgaaatcaatgttgacttttcagaatttgtatataaaagcttgcagacagaaacctgtatttgctgtcatgaaaactgttgggaaaatgaactaacctaagaaagcaagagtagtcaggcagtgctgcgtgcctataattccaatgtgttggggaacagatgcaggaagatctctgtgagtttgaggccagcctggtctagcagagtgcgttctaggacagccagggctacacagagaaatcttgtctttaaaaaaaaaaagattttgacccattgcaatgtccctttaaactcatctagatgctgttttcaggcaataaaacaagggcctgaaaactttgcctagttgccctgcaagcaactgcagacacttccaaggcattgggctgaaggagtacttcgttcttatctatacataaatctgactagagtagaggggtgcattctgaagaaattctcaaaagaatgtatgaatttctcaaatcagaagtaaatctatgatcaacagaagggcatagacccaaaggaacataaaatctttacccatttactgtatttcaaaggtccagtgaatcccatggcttctattatcttcgtgaagggaccgaccttctcctcaacaggctttgggaaatcttggatagtaggaagctacttaaccaaagaaaaagaaatcaagttagttacaagaaatttcctaaacagagtgcttttatttcttccttctaagaacatttttattgcttagatttttttcactttgatttcctttttttctacttgcttgctttgactgttctgttctgttttagtacagtgctggagatcaaacccaggttttcacaaacactgggcaagtgctctctcatggagccagactcagagccctcacttaggtgtacaaacacatctgaaatggtatctaacagacatcctccaaattacaaagcaaagcatacccacctaagtaaccatgtgcctgtgatcccatgattaggaaagaagagactagaggtactagaataaaggtgacatgaaaaagagagagatggctcagtggctaacagtactggctgctcttccagaggacttaggttcaattcccagcaaccacattgcagccaacaactgtctataaccctagttctaagggatctgatgcccacttctggcctctgagggcaccaagtgcaagcctggtgcacagacatacaggcaggcaaaacacataaaaaaatagaggggaaagggcaaggagtgggcagaagggagtgaaggaaaaagagtaagggggagaaaaaggaggaaggaagagaggaacgggggggggggggggggggggggggggttggaaaaacacaggccctgcctagaaaaaannnnnnnnnnnnnnnnnnnnnnnnnnnnnnnnnnnnnnnnnnnnnnnnnnnnnnnnnnnnnnnnnnnnnnnnnnnnnnnnnnnnnnnnnnnnnnnnnnnnnnnnnnnnnnnnnnnnnnnnnnnnnnnnnnnnnnnnnnnnnnnnnnnnnnnnnnnnnnnnnnnnnnnnnnnnnnnnnnnnnnnnnnnnnnnnnnnnnnnnnnnnnnnnnnnnnnnnnnnnnnnnnnnnnnnnnnnnnnnnnnnnnnnnnnnnnncgtagataattcagtcagtaagaaattcttgtaagatttatgactgtgttaaacttgtacaaactccataataattattttcctctaaaacaattattaatttctagacaaagagcctgcagtagaagaaacaagctcacaagataggcttcacatagtcaatgagtttgtcactcaccatcctctgtaaacttgggtaaatccctccaactccccgaacctcaccttctatattcacgtaaggcatccacataaggcagtctacagtggacacactcaccttacttgtggtgtggtatttcctattctgctgtgtgtccatcccaacactttgttctaattccacccatactcgagactggttcatctgtggcctctggaggatgaacagacagatatgagtgacactgagcatgacttatcaaagttagcccaagaagagctctctggctggctctacccaaccttgcttgcccaacttctggcgaaagaccatcgatcgaaaggagccaagatcagcagccagagtggtgtctggtacatggcaggtgcttaacaagtatctattatgtaatggctcacacttgcaatctctggaaggctgaaacaggaggattgctgtgagttcagtaccagctcagagcatagttgagagatggttccaaagaacaaaatgaagtccaaaaattaattcggtatagactgaagtcaactcagagaagtaaaattataataggaaaatgaaagagtactgcaatgagtttctatgtaaatgctgacaatgtctgatgtgtaagagagggggcatcaattttaagattaaaacttgttactgctggtaggcaaatttctgtacgtttgaggctagcctggtctgcagaacaaattccaggacagctagagctatgccaagaaactctgtctcaaaaaaaaaaaaacacatttggggcagccaggtagtggtggggcacacctttaattccagcacttgggaggcagaggcaggcagatctctgtgagttcaaggacagccagggctacagagagaaaccctgtctcaaaaaacaaaaacaaaaaatgacaacaaaaaaacttggataatatctctcaatgtcaatggtcttaacttacccataaaaatatataggctaacagaattacagagagaaaccctgtctcaaaaaacaaaaacaaaaaatgacaacaaaaaaacttggggttaaagagatggctgctcttccagaggatccaggttcagttctcagcacccacatggtaactcacagctccagaaaatccaacagcctcacacagacatacatgcagacaacacaccaaaataaattaaaaaataaaacaatataaaaatttttaaactgcttctgccacctaaaagctcaggggccattgacaacttgctgcacgtcagttacagtgaggcctgaaggggaaaagcatggaaaatgcatctcacatgaaaaacacaattttttactttttttattttaaaaacataagtaaaattacaaacaaaattatgaatgtgtgtgggtgaatctaggaagcaacacacagaaatgaaagggttatttggttaaattggaattgtaggtagcaagttaggaatgtaactcaatagtagaaccctttgcctaacatggacaagaccttgagtctgagttcctgtaccacaaggagggaaagaaagaatgaattatgggtaaatttgggaactcagtgtccaaattcccagcaatgttttaattgccataaattaattaaaagaggggtgtagtgggtgagagctgggcatggaggcacatgtttttaatttaatcccagcactcaggagacagacacagggggacctatgagtttgaggccagcctggtctacatagtgagttctacccagcacagtctcaaaaaaataaaataaattaaaataaaataaaataaaataaaaacaaatatgggagggtgtagagggttaatcctacaattctggtttattccaaaaagaggaaggctaaatggaattaacaatgatttagttgtttcatcttaataaaggaaaaatagtttctcattgtggactagtactatttgtatttctttccaaacaaggatattaaaagattagtcagaactcgtctgcaggcccagggacacttatgctttaattctcaagtaccaagcaggctttgtgaaatacagactaaacacagaacacctcccatgacatcacacacatcagtgtaatggcccatctagaacacaaagcacttcagctgcctccaagaatgcaaagtggagcctgaacagagtgctgcctcctcctgtgttggtgttcgctgagacatctttctctgtccccacaggtccacagtggtcacagattccttctactgtacactgtgaagcaccagggcaccaccactttcccactctcctgctcatctataaacacacatttactttggggaccaccctccttgcctttgcctacttcaaaaggggcctgggagcccctcaatttttcatctttttcaagctgaagagactgcccaaaataactcaaatattactttttcaaagagaccttctctctcttcttttggtttttgttttctggttggtttccttttgttttgagactgggtctcatgtcgtctaggctagccctgaacttgctatgtagctgaggataatcctgactctccagcttctacctcccgcttctgaaatgacaggcatgccctgcagtgtccaacttcatgtggtgctggggaccaaacacgctagaccagcaccaactgagctacacccagccctcaaagaggccctccctaactaccttataaagcacagttctttacaacccattatctccaccaaaacgtagcctattcacttcctccatggtactagttaaatgcataattatacatttacttaagtatttgcttattagccgggcgttggtggcgcacgcctttaatcccagcactcgggaggcagaggcaggccaatctctgtgagttcgaggccagcctggtgtccagatcaagtaccaggataggctccaaagctacacagggaaacactgtctcggaaaaaaaaaaaaaaaaaaaaagtatttgcttattttccagcaccactgtcaaatacatacatgatggtaagaacagcctctctcatcagaatggactccaatatggcacacaggagacacgtaagcagttgctgacaaagcaaatcctccatttccataatatttgattccccacccctaccatctttgaccacatatacaccatagatacatgcttcatttatccaagctctactaaatgctcaagatatgccagccctcatacaggcttgagggtagaaataaatctgtatcctctgggagctcatggtcttacaaagaaaagaaaacaaaagagaatttaacatagaaaaccagaactaagtgccacactggaaatgtcactcccagaagtaaaacactccagtgtcaggaaggatggagagcctccagaacactgacacactgcttgtgtgcagacaaagtaaatgcgccacttggaaatgtatttggtagtgtctagttaagatgaatgcccagcaagtaaggctcgggaattctacattcttacctcaacagaagtgtatgcgtgcactcgcagtagcagtgtcatgtaaggttccgagtagacacaacccaaacaaccatcagcaggagagcttgatgaatcaaggcatagccatataatgaaatactgtggactcaagccccaggaccaaaaaagtcaatactatggtgagaattagtcaaccaccactacaaagaacagatttattaaatctcccaaacaaggctgaatgacagcaaacacaagagactgcttgacagatgtttaaaaggcaaatgaatctacagaacatgaggtaaagatttgctaaccttggtgtggatagtagctaacgggggatcgaagagacttcggcaatctttttgtttgttttgttttgttttgttttgtttttcaagacagggtttctctgtgtaacagtcctagctagctgtcctagaatttgttttgtagaccaggctggcctggaactcacagaaatctgcctttttgcctcccgagtgccaggattaaaggcatgtgccaccactactcggtgagacttttgcgatcttagtaatgtgctttgttttgttgtaagacagagtttcatgtagcccaggctggcctcaaatgctctacgtagctgaggataaccttctgctcctcctacttccactttccacgtgctaggactgccagcatggacaccacagctggtttatgtgccactgtgaattgaacacagagttccacaaatgttaggcaagtcctccaccagatgactacagcctcttgttctactcttgacctggatgctaggaatgtttactctgtaataattcattgagttgtgatttgtgcctttttctccatttatcttatatcccaataaaaacaccccaaaatttgggctggggagatggctcagagattaggagcactggctgctcttctagaggtcctgagttcaattcccagcaaccacatagtggctcacaaccatctgtaacaagatctggtgccctctttcagtgtgtagacatgcaggcaaaacactatacataataaataaatgtttaaaaaaaaaaaaccaaaatcattaagatttggaataggcaagataaacaacagaaaacaatgacctggaatcaccagaaaatcctcctagaagaggacggagcagagaagtgagagggcagctgagggacccgaatgcagtgaaagaagacacgggctgaacctcctgctctctcacaagggttctgagaaccagaaacaaattacatatgcaaaagagatgtgcaaactgcgatgagtaatatatgctataaacatataggtctagccaggtggtggcggcgcacgccattaaccccagcactcaggaggcagaggcaggcggatctctgtgagttggaggtcagcctggtctacagggtgagttccaggacagcagtgctacaaagtaaaccttgtctcaaaaaaaagtatgtatgtatgtatgtatgtatgtatgtatgtatgtatgtataagtgtatatgcacatatgtacgcacatatgtgaataagtaaataaaaagagtaagatttcacacaacaggaaagcaggaaggctcagtgggcacaggcccttacacacaagccaagttcaaaatacggatcctacaatgtggcatgagtaaacttctgagagatgtcctctgactttcccatgagtaccatggcatatgtaccctgaactcacacacacataataaaataaatgaaatctgaaaaacaatttcacacttatttttcgtttcaaaaagtttgagggccggagatgctggcctccatcctcagccctagacaaagctggtgcagtggtgtaggcctgtaatgccggcactcagagaaggtggaggcaggcatagcagcagttgaaggtcatcctcacctagatggttaacttaagaccagtctgggatatacgagtcaacaaataataaggaaatagttaaaacaacaaccagcaaaaggtcttgaaggtgaagaggctcccatggtggggaggagtgggacagagacaggctcaaacagttcttgaatgctgagagtgtgtgtatctcacagtccaccagggcacagcccacttaacactccttttattctctgcaccagtgctcaacaccattctgggcatggaatcagtactcaataaacactaggtagatttttgttcaaagagaaggacaacctggaggaggtccaaaaaagaaccacagcctgatcaaagggaggaataaaaggtcctcctggtggaaaggttaaaatgaactgaagttgtttagcttggagaaaaggcaactgaagaattaaggagtaacttagaataacactggggctggaagacattgcagaggtctcccagtccaattttttcacttcatagatgaggagactaaaaccaagggagaggttgcaacttggggaaggtaggttaggataatatttttttttatttgtgttttatagtgaggactaaatttactcaagcagtatgagcttatatagtaataaaaatagcagttacaaaactgggtgtggtgtcatatgcctctaatcccagcacaggaagaggcaggtggagctctgagttgaaggttagcctggtctataaagaaagtccctatctcaattaataaatcctcagtcaataaatgtaagactggcagaaagaggaaatcaacagtagggaagatgactgtaatgattattagtcaagaaccatcaagagaattatgatatcattcagcaatccaaattggacatacatccaagagtagggtctcagggagatctttgcacaccaatgtctactataacattattcattattcacaacaaacaagatgaatccacccaaacatccaaagaatttcatggattaaaaataaatatatacttgagtggtggtggcgcacgcctttaatcccagcactcgggagacagaggcaggcggatctctgtgagtttgagaccaccctggtctccagagcaagtgccagttcagcttccaaagctacacagagaaaccctgcctcaacccccccccccaaaaaaatacagtatattatgcaacagaagattagggtagccctcacaagaagaaatcttattacatgccacatatgcatgaacatagaagatcttaagctaagtgaaaaaaagcgagttgactgcacttacattcaacaattagggtgatcaactccccgttaaaaataaggaaaaaggggctggagagatggcttagaggttaagagcactggctgctctttcagaagtcctgagttcaaatcccaggaaccgcatggtgactcacaaccatctgtaatgaaatctggtgctctcttctggcctgcaggcagaacactgtatacataataaataaataaacctttaagaaaaaaataaggaaaaagttcgctgggtatgttgatgcaccccttgatcccagtactgggaggcagaggcagaggcaggaggtgctctgaattcaaggctagcctggtctacagagctagatctggacagccaggactatatagagggaaaaaaagacatactaagaaaattagaggtctggagagatggctcagaggttaagagcactgattgctcttccaggggtcctgagttcaatttctagcaaccacatggtggctcacaagcatctacaattcaatctggtgccctattctggcatgtaagcatgcagaacactctatatataataaataaattaaaaaaaaagaaaattagagcctataatgccaaaaaaggacataatttacaattactatttcaatgcaaataaaggctatctaaacattaatatcgtctgttctagtaagtgaaaaaacaccaagatatataattctatatatatttgatatttgttaaagtacttaactatttgtttcagtgctggagactgaagccagatcctcacgcatgcaaggaactgagctataccccaaccctgtcaggatacttaagggaaaaattaatatgcacaaatttccataaagcctggaagagaaccagcagagatgaaaatattgacattttcagatttgaagtcacagatgattttatttcctttaatactaaagtattatatgactaagcaggacagaggtggctcacgactttaatcccaatacttggaagtcagaggcaggtggatttctgtaagttttaggtcagcctggttacacagagccatatctcaaaaaacaaacaaaaaaaggtgttatatgacttataaaaattaagaaatcaaaacccattaaagagcccaaggttcaagacatcaaaataaaccatgtggtcaatggtaaactaaggccttcgataatcgtgtcttggattttatgttcataaagaaaaggaaatattttgctacccaaagaaaagtagcacaaaataatttttaaaagaaaactgaaagttaactctaagatgaatatctggaaaaggtgcctaacactaaaaattatcagacatggtatccctggctaagttccacttagcaggggtattaagaagcgacaccctggacatgacaccacagagacccacagtgatctcatggggctttttcatcacacgatgtggtttggacataaaaaaggtttcatagcaaccaaaagaacaaactttacctgggaagtgctggagagagtcctgtcccactgtctttgagtaggagacaccgataccagttggctgcatattggaacccactgagagatgttagtctggttcctctagaaaagaaaaacaatgtcaggaagccatcagagtccatatgtagagagtagagtgtacctgcaatgttgtaaaacagtaagaattacagatttggttggggtggtggcacacacctttgatccctccatttgggagacagaagtggaggaccttttaaggtcagcctgagctacatagtgagaccttttttcaaagggggttgggggagaagaaatacatattcagccttcaagtttggctcctggcaagagttcctaaaccttctggcattcagacatgagtgttttttctttcataacaaccactttcaaacttaagcgtttatgctaatgacttgactctacaaacagaggacttggttgggtaaaggaactaatcgccagagtgccactgagtgacctaagtgttctgttactaccctactcatacaaagagtatgtgtatcaacaactttccaacatcacaaagttagtaaatggcagctttaggattaatactggaacccagatagctatctccagaacctgtgcacatttaagagatcaagagaacagtttaccttgagggtccttctaattctaatactggaggtagagccattagcagagttttgaaccaattaaaacagcatattggaggttagggggaagggctggagagacaactcaagtggttaagagcactggctgtcaaacacatctgggggttgattcccagcacccacatggtagctcaacagtctgtaactccagttccaggggattcaatgccctcttctggcctccgctggcacttggactcacccgtgtacatacacataatatttaatgtgtatttaaaaaaatgaatcttaaaaaaaaaaaaacaccatatttggagctggcactatgacttggtgccttgcctaccaagtttgatgtcctggacccatacagtggaagcagaaccaactcctgctggtattctttggaccactacaccatggcacacatgagcatgtgcacaaacatgaaaataagtaaataaataaataatgtaataaggtctagagtcatcttttaaaaattaaaattaaaaaagaaaaaaaaaaagtcaagcattgatggggcatgcctttaaaaccaacactggggaggtagaggaaggcggatctcttgtgatttcaaggccagcctggtctacagagcaagtaccaggacagccagggttacacagaacaaaccctatcttgaaaaacaatcaaatcaggggctagagagatggctcagaggttaagagaactggctgctcttccagaggtcctgagttcagttcccagaaaccacatgatggtacacaactgtctataataagacctaaggccctcttcttgcttgcaggtatacatggcagccagaacactgtatatataataaaagtcttttaaaaagaaagaagaacaatcaataaataaaacagaataacagccgggcagtggtggcacacgcctttagtcccagcactttggaggcagaggcaggtggatctctgtgagttcgagaccagcctggtctacaagagctacttccagggcagcctccaaagccacagagaaaccctgtctcaaatagtttattgtgggccagcatgatagttcaatgagtggacagatgaccagagtttgatcctcagatcccacaaggtgacaggagagaaccaattctcaagacctaacacatgaatgacactgtagcacatgtctgcactcacacacacacatatacccataacaaatagcacatgtggaatgaactgtgtacttgcttcttcagaggtcctgagttcaattcccagcaaccacatggtagctcacaaccatctacaatgtgttccagtgccctcttcttgcctgcagtgcaggcataaatgtaggcagaacactgtatatattataaataaatcttaaaagaaaaaaaaagacaaataagaaattccaggactgagaatggataaagaaaatgtggtatatttacacaatggagtactactcagcagtaagaaacaatgacatcctaagccgggtgttggtggcgcacgcctttaatcccagcactcgggaggcagaagcagactgatctctctgagttcgagaccagcctggtctacaagagctagatccagggcagcctccaagagccacagacaaaccctgtctcgaaaaaccaaaaaaaaagaaagaaagaaacaatgacatcctaattcccaggcaaatagacagaactagaaaaaaacatcctaagtgaggtaacacaaaaccagaaagacaaatatagtatgtactcactcataagtggataccagacataaagcaaaaggtacccattctacaatccataaccccaatgggctaagctcctggagtacaatcaaagtgagggaggagccataatatgaacaaaggagtcaagaccatgatggggaaacccacagaatcagctgacccgagctagtgagagatcactgactcagatctgacaaatggggagcctacagaagaccgaaataaactctcttaatgtaggagacagtggtgtgactgggacagtatatgaggccactagcagtgggcccaagatctaactgtaatgcacaactgacttaatggagcccattctctatggagagataccttgcccagcctagacacaggggtgtgggggtggagaggtaccttggtcctgcctcaacaagatgatgggacagacttagtcgacttcgtaagggaggccttaccctctccgaggaacaaatgggaggtggggaagtggggggagccggaagagagggagggagggggaactgggaatggaatgtgaaagataaattaataaaaaatgcaaaaaaaaaaaagaaattctagggcgggggtgtagctcagttggtagagtgctttgcctagtgtgtacaaagtatgagggtgcacgcctgtaatcccaacacttaggaagcagaagcaggagaatcagaaattcacaatcatccttgtctatatagtgggtttagaccaccctgggctacatgagactgcctaaaaaataattttaaaaaaatttaagctggaattgaaatgtacaataacaaaaatgaaaaatggcatgcctcaatagcagatttgagcacaaagaactgataaccctgaagatacctcagtggagattatccagtctagggaacagaaagagaccaatgggatactatcaaacttgccaaatatgtataacatcaggattcttaaggaaaggaaataaagggacaggaaaaaatttaaaacaaaaccatactaactaacagaaggcatcagggaagggctggaagagatggctcagcagttctcaaggacctgggtttattcccagcatccacatgatagttcacaaccattcataactccagttctaactcttttctggcctctagaggcactgcacacatataatccatagccacacatttcaggcaaacactcagatacataaagtaaaagtcaataaaatctacacacacacaaacacagcagaagatatccccaaatttgttctacaatctaagaaattcaacaagcttcaagtaggataaacaaaaagatacatcataatcaaattgtcaaaagagaaagaggaaaacataaagaaaaaaaattgttgataaactgggcagtagtggggcacacctttgatcccagcactgggaaggtctatagagtgagttccaggacaggctccaaaagctacacagagaaaccctgcttcaaaaaaccaaacaaacaaacaaaaaaccattattgacagcagcaagagagaagcagctcatcacacacaaggagcccttagtaacactgaactaatttatcctcaaaaattgcagcagccaaaaagctatgggaagaattcctcaaaatgttaaatgaaaaaaaatgttacagcctgaccatattgggacataacctgtaatcccaatactcaggtgcctaaggaagaaggacaatggcaagtatgaggctagtctaagttacagtgggaccattccttaaaaaagaaagagaatagaaccagtaagtaaaatttctatatccagcaaaactatcattcaaaagcaaaatggaaggtaaagcaaaaaattcccagataaacaaaaactgagaatttgtagaccaccaaatctccaaaaaatattccttcagaatgaaacaaaaggatgctagatgggctgacaatttggctcaatggttaattaaaagcacttgttgctcttgcagagaacctgggttcaattcccaacacccacatggcggctcatggctggctgtaatcttggtctcaggagacccaacatcatcttctgagctcagtgggtacaaagcatacatgtggtgtccatatacaggtggtgcacatatacacatgcaggtaaatacataaaataataaaacggggatgctaaacagtatttcaaatctatatgaggaaataaaatacactggggtaaagttaactacttaagtaaataaaaatagatttattattattattatttttaggtctctgggagggtcttttttttgcaggggatgaggcaggattcctctgtgtaagccctggctgtcctggaatttgctctgtagaccatgctggcctcaaactcagaaatctgtctgcctctgccttccaagtgctgggactaaggttaaaggcatgcactgctgatgacctggttttatgcctcaattttttaatttaaaagttaatataaaagacaactataagcctgttgatatacatataggaagctgtgatctgaatgacagtggaatcaaaaaacaggaaatagaatagttatatagaagcatagttcttatatctctgaaatcaagctggtaccaactcaaactaaatcatcataaattagggtgctaattgtatttccaatataatcacaaaaactttcttcctccccctaaaaaatgccataaaaccttttaccatgggctaggtcttatgagtggcagtgcatctgcctagcttggcaaggcatttaaagccagcctcagctacataaagtccaaggtcagaccgacctgcttgagactgtctgaaaaaacaaacagatcaggtatctgtttaatcccagcaattcgaaggcagaggcaggcagatccctgtaactttgaagtcaacctgaacaacatgagttccaggacaaccagggctataaagagagaccccatctcaaaaaaaaaaaaaaaaaaaaaaaaaaaaaaaaaaaaaaaaaaaaaaaaaaaagacagaaggatcaatgcaagttcaaggctacaaagtgagacctcaacccacacccaaaagatcaaatagcttggtcatttctccaaagatacagaaatgacgaatatagaagttcaacatcactagtcactagagacatgcagatttttaaaaagcacatattgtctcatttccattagaataactaacatccaaaaacaaaaactaagctgtagagaagcttaatttttttttgcatataggtggtacagatataaaacagcacatcagctgtccagttcccagcttccacatcatgtagctcagaccacttgtaactccagttccagaggatcacacacacacacactttttttttttttttttttttttcccccgagacagggtttctctgtggcactagctcttgtagaccaggctggtctcgaactcacagagatccacctccctctgcctcccgagtgctgggattaaaggcgtgcgccaccaacgcccggctacacttttttttttttaaacagacttaattcgatttatttttcttgtataaaaatccttatgtggtgtggactttcacaagatggtcagtgaattcctgataaggagacttggtgaacacagtctctttccagaggtctgaagtcaggtagctgtaggtcttggagatggcatcaaaggtggccttggcaaagttgcccagggtggcagtgcagccccctggatgatgtgtagcggtcatcaataccggccatcatcagtagctttggggcacaggagcagagacgatgtcagtgcctctgggggcagggatgagacgcaccaacacagagccacatcggcctgtcactttgcatggaacagatacacacactcttaaacattaaattaaagaaaaaaaaacttaatgctgggccttggaagcaaatgcctttaataccagcactggggaggcagaggcaggaggatctctgtgagttagaggccagcctgatctacaaagtgagttccaggacaggctccaaagctacacagagaaaccctgtcttgaaaaaaacccaaaaagaaaaaagaaagaaagaaagaaagaaagaaagaaagaaagaagcttaaatataggggtgtaaccctgttgatagagcgcttgcatgcacaaaaccccaggttctactcctaccaccacatagacttagtggagcaggccagtaatcccagcactggagagatggaggatcacacccaagttcaagtccagcctagggtacttaaaacactgtctcaaaagagaggaggaagaaaccatcacagtttttattagttgaccctctgatcaaacctaacaacatcactgattaaaaaaaaaaaaaatctggggtcagtgagatggctcacggagaaaaggcaaccagatggtggcctgatttcagccccaggacccacaaggtaggagaaaatacccacaagttgtcatttgacctccacattcaatgtacacgcccaggcatgtacatacccacacacataaatatatcagatctctgagttcaaggttaacctggtctaaaggcacagtgcaggacagccaaagctacacagagaaacccagcctcgaaacacaaaaaaagacacagacagacagaaagaaggaggaagggagagagagagagagagagagagagagagagagagagttgaggggctgagcaatggttgtgcatgactttaatcccagcagcactggagaggcagaggcagatggatctctgagtttgaggccagcctggtctacagagcgagttccagggcagccaaagctacacacacacacacacacacacacacacacacacacacacacacacacacacggggagctctgaagctcagagaagtcagttggttactcaagactccacctacagcaggtggtggagccacaatttccccatgactgtccagatcctagagaggttcacaaattgccctcccggatttctactttgaactagtcctgagagagttactatagctccatcaagccctgttacaatgtataagaagatctcagggaatctacagggaaggagattttctttctctaaccccagcatttttttgtaccaagaaaaataaacatgaaagaggaatagacccaactaagagaaggcaaatgagaggtggattttaccgatgctttcagcaggaggaaatgaacctgtaataacccctatgctcagggacaatacatttaagagagctgggcacaaatccccaaggcaaatcaagtttccatttcaggactccagcccaatacatttttgttttctattcccccaaagtatctgtcaaaactaatgtaggattcagcagtaaattccttatctagcatgcatgaggccctgggtttaaccctcaacacacacacacacacacacacacacacacacacacacacacacactatttacaatagacaggttgcaatttccccagccatcctcagatctttttttttttttaagattttatttatttattatgtatacaacattctgcttccatgtatatctgcacaccagaagagggcaccagatctcatcatgaatggttgtgagccaccatgtggttgctgggaattgaactcaggacctctggaagagcagtcagtgctcttaaccattgagccatctctccagccccatcctcagatcttaattcaacttccactttagcatctataattacttcagcaaatgaatccttctctaggaaacaggaagacacacctcaaacaaaatttcctgagcagcaactaagagttctgcactttgttagggtggtaaagaatgtagtgactcacatataaaattattttaaaaacacataaaataacaatccaaaagataaccaaaggcaggaatagtgtctgctacatcaaacagtgcccttgaccaagttttgcaaacacctgactaaaattacaaactgtcccatgccttcgtgactaggaactccgctgtcattttcttaacccttcccagaggtcaggagtgactctcaagatgatttaaggccaaatctcgggagggagggacgtggacagacctccctccccatacggattagaaagagtctacaagtcttccttttccttcattcattcaacaagtgttaggttgtcccaaatactagggtgggcagtgaaagccacagggccgtttctcaagttttgctctgataacctatgcattcccctgaactacacaagtaagaattcacttaagtctctaaaacaaactaaaagaacctcagaatccaaagggactgcaaggagacgtgtgtcctcatttttcacacggacctggaacctccagttatcttactcaaggtcacactgtgacgggcgtggactagacaccccctcccacgttcccccgattacggtcagtgtcccccccacccccttctcccagacagcgatgctcatcccataaaggtccgaggtcactgccttctaaaacggcggagaagccaaggccaaatggggggtaaggagaggtgggaagctgccccagttgacccgtggaaaggcggcaggcaaccgagcaacggcacgggctcccccacttctcccctgctctcccgccccgccctctccaaccccgagctggagacgcgcgtgcgtctgtagaaaagtatccctgcactcacaaggactcgcaccagcaacgccatgttcctccacgatcatttccgggtgaagggtgggcttccggaatcccggttgtcaccacccactcaggacgctgccctctggctaacgggactcaggctccggcaggcagcgcaggcgtagttgtcgcactgcgcacccgcgggttgcccaccgtggatctgaaggaggctccggggcgcgcgacccctcgcgggtcttctgtccccgctgtgcgtcacaagggctcgcgttcttcccccacaccacctcccgggcccccggcctgtgacaccccgctcacccttggggaaccccttgaccgccattcctttcctgactccacccccaggagacgacccggctgcagggagcaggacttcggtgtcccagtggcttagaggagctcggggagcctgagaacctaagagcacagtcctggaaagcagacccgacgcctggcagactcaggaacgtggggcttgtggttggctggttaacgggagcatctttgagtattgacaggaaagagtaaatggggagaaaggagcgtggaaagcgttgcctgtgggaatgagaggatggtcttgactgaagaactcttgtatgccaagagaagtagaaaagagaagatactgctgctttggggactgaggggaagccgaagacctagccgttgaagcgcttcctctccacccagtcaatacagacccactgggtattccgtatggactggacacccgtccaatgtctggtaaccctgtggagcttgtgagctcgttgaggaaagtacgggtagatttgtctagacaactcgtgagaaaaataaaaactggtatgaaggaaccataaatacctaataaagataatgatatgggcaactacctggccagcttagccagataaaagcccatctgaggaagtgacgtgtaaggtgggatgcagggtatactttattttttatcttttcaacaaaatttcttgtagcccaggctgacctcagactcttaagtatatgaggctggcctcccctgcctcaagctcccatgtgtgtgtggggggggggggtttacaggttgtgacactaggcccagcctcacaattttgttttggtgttttgagcagatctcactatgtagctgtgtcaggcctggaactgagaaccaactgcctctgccccccgactagcagccaccacatcgggcaaaattctgtatgtttatcaagtttgtggtttttaaatatttacatctagaatggctaaattaagcttatgaccggacaagacagtgcagaggttcctccatcttgttttgtttttgttttgaggctgtataatagccctgtaagaccaaactggccttgaacatacagagatctgcctacctctacctctacctcccaagtgttgggaggtggcatgcaccaccactcccggcattccatcttgtattcttgctgagaccatttcaggtttaatttgatcttcatggacaatcccgaggaaaattacccaactctattcaaggaaccccaggtcaagatgccctatttaacctattttagcttctgttgaactgcctgcttgtgcaaacttccccctctggctagctacttaccttagcttctgataaattgcttgcttacatgaagcaccctgcaacttccgaaggagatgccaggtcatggtttctgccttcaaaaaccccatgctcggaacactcggcactaacttagtatctggatacttgagtatagtccagactagctggaataaagacttaaaattgcctataaactgtgtctgagtgttcgtctctggtgggctccctgtacaagttaatttgagccaggagtgatgacgcacacctttaggcagaggcaggcagatctctgtgacttagaggccaacctggtctacagagtaagctccaggacaaccaaggctacacagagaaattctgtttcaaaaaacttgaaaaaaaaaaagtttttgtaggggtcttccatttggtctcctcggtggctattctaatttatattcccacttacagtattgccagtgttcccttttctccacttctcatcaacacggttataatagctagcctcaaagatgtgatatcctattgtggtttcaatttgcacttccctgatgattaataatgaaatagtttccccgtgtgcctatggccaattacatatattctggggagaaatgactattctcaaaaatcctttgttcattgttggggactgatgttgtcttttggttggctagttggttgggtagttggatgggtagcttaagacagagtctcactaagtagccttggctggcctggaattttctatgtaaatcagactggctttgatttcaaaaagatctccactctgacggctgtgttctggactcaaaggcatgtaccaccacacttaataccactgtcttgtggtattagggatcaaacccagaacatgatacatagcagggagggggcaaaaaccctaccaataagctaccctttgcctagtctttaatcagataattttgttgccattgcactgagtgaagtctttatatattttggatattaacatcatgccagatatatgattaacaaatactttttccactccataggtgtctcttcactctgataattgtttccttttctagtttgaagtagttacaactgtctttgttttggttgtgttgtttctatactttggagatcattaaactaacaaacgaaaaactactgggggttggccatgatggtgcatgcctttaatctcagcacttgacaggcatatctctgttagaggccagcctagtctacatagagagttccagaatagccatgactatatagagattctctctaaaaaaaattaagactagtaataataaactgttgttggagctggagagatggcccagtgcttaagagtaaatactgcttttctggatcaccaagttctattcctgacaccaacataggtggctcgaagtcacttgcaactccagaagatccaaggggatttgatgcttctggcttccatgggcacctacatgcgcacagcatgcacacacacacacacacacacacacacacacacacacacacacacacacacacacacaaatattggagccatgtaatcccagaactcagaaggcagaggttggtggatgatctctgtgagtttgaggtcagcctggtctacagagccaaatcctgtctcaaaaccacaaaagaatatttggtcagggtgaaggctcagtgggtaacatgttcgctgcacaggcctactgacctgagtttaatgatccctggaatccacataaaaagctgatgggtggcacacatctgtaatcccaacacttctactatgagataggaggcggagacagaagaatcagggagaagctcctgtagcatcatgggttttattcttctgaactctgggagtgcaccatggcacatgcttatccacactcacacacacttgtttaagaaaatgttgcccagaccaatgtcacggagcttttcacctactttttatgcagtggttttaagtttcaggtctaatgtctaagtcctcaatgaacttttgttttgaaacaatcttatactgtgtggttaaggctgctttcaaactcatagatccacctgcctctgcctcctgaatgctgaggtcttcagtaaattttgagttgatttttgtgtgtggtagaagtaagaatctaggacctagagacctgacttagaggttaagagcactggctgctcttccagaggtcctgagttcaattcccagcacccacattcagctcacaattgtctataactccattctaggggatctggcccccttacttgggcatacctgtgcatacctgcaggcaaaacaccaatgaacagaaaatgataataaataactattttttaaaaagaaagtaaggatctaatctcattcttttgtatattggtatataatcatcctaacatgctcattttgtggggagagagagaaagagagagagagaggagagagagtgtgtgtaatgtttatcagattaaaaaaatattgattcctttttatctgtgtagtactgggtgtcctggaactcacactgtagaccaggctgagctcggaccacagagattctcctgcctctgcctcctgagtgctgggattaaaggagtgcaccactatgcccagctaagaaatattcttttttttcttgtttttattgagctatttcttccccatttcccttccctcctcctctctccccctgaccctcacctcatccccccacactcccaatttactcaggagttcttgtctttttcctcttcctaggtgggaaatattaattcttggtttgctgagtttgtagatgtgtgcctgtgtatgagtgtgcacgtgcacgcccatggaagccataggtggaaatcaaatgttttcctcaatccctctccaccttattttgcaattttattatttattattaccatgtgtgtacctgtgtatgtaggcgtgtgccacagcatatgtgtggaaggcagaggacactgcccagcctcaccctccttctttatgtgggtttcaaggacagaattcaggttgctaggtctgacagtaagtgctttgtatgcactaaactgtcttactagcatcactgtatctgtctgttagttttttgagacagggtctctctgtgtagccctggctgttctaggattgtctatatggacagagatcctcctgcctgtgcctccctggtcctgggattaaaggtgtgagccatcactgccctgctctcaccgagttgtttggttttgggttcttgtttttagacagttctctaactgaatctgaagatggctaatttggctagacaggctggctaaaatgctccagtggagaaaaagaggtactctgagtgtgccgaaggttgatgacatggatggaggctgaaggaagtcaccagccaaggggccacgtaaacaaatgaacaatgacttacaaagtggtcatttctttcttgggtttcacattgatgctgagtccaaactcaggtctgtgctatctccccagcctcctccccaggcctttctcccaggtcttttgtatatagtttcccccccttagaaaatgtatcagtttagtggatgtggtttggtttggtttttgcaggtttttcagagtttggcaaatgctaagcaagcactataccagggatacaccccatctcttccatagttctttttttttttctgagatagggttgctatgctggtctcctggactcaagtgagcctggtacctctgcctccagagttgctgggctacaaatattcaaccaagcccagctttaagttgaaaagtttaggcatgaagaatttgccttcaccactttgtaagtcatcattcacttgttcatgtggcaccttggctggagtcttccgtcagcctccatccatgtcatcaaccttcggcatgcccagcctacttcctttttttatactgtcagtgtcttccccaaaagttgctctaactccagttccagattcccaagtagtatataagctcttcacaatcgcagagaattggtacttttttgtttgtttgttttggcttttcaagacagagtctctctgtgtagctctggctgtcctggaactcactcttgtagaccaggctggccttgaactcacagagattcacctacctttgcttcccaagtgctgggattaaaagcatgtgccaccaccacccgtcgaggattggtactttacctcatctttagacttcaaaatgctttaaaccaagagtaatgactcatgcttataatcccagccccaagaatgctgatgtaggatgcttgctgagatcaaagccagtctgaactaccacagtgtgaaatcttgtctcaaaaacaaataccaggggaaagactaatatgtcgaaagtatattatatacttgtattaaaatgtctgtataagcccagtagtggtggtgcacgcctttaattccagcacttgggaggcagaggcaggcagatctctgtgagttcgagaccagcctggtctataagagctagttccaggacagcctccaaagccacagagaaacaatgtctcgggggaaaaaaaaatgattgtataacacacagtatcatgtataatgaacatacaccaacaaaaatttttcagaaataattcataagctttaaaaaagaaaagcattccaagatctgcctagggagcgagctatacagtacagtaactcacctataggatgaaggttatagcagctatgtcatagggtagttgtgataattaaggatgtagggatttagcaccatacttggtcccatccaaaggcgatgtctatgcatctcttagtacattgctctagcctctcgaactacatgttctgatggcatctcttctacctacagaaacccttcagctgggatgatgtttccttacacggctgctcttctcctcctccctcatccttgtagctctagtttcttcagctaaatctcttaagactttatttctagacctctcactatcacaacctcctttgttcatcctgtaatggcttagatcaagaagtcagaaaacagctgggcatagtgctgcatagctttaatctcagcactcaggaggcagaagtgtagacagaatattctgtcttctgccagttaactctgtccatccagccagctcccaaataaccacttggagatttcttattaattataaatgcttggctgatagcttaggcttgttactaactagcttttacatcttaagttaacccatatttctaatctacactctactatgtggagatatttttttcagcagggcatgttcatcttcttctccatgcatctcctgggtagtccacccttcttctttctagcattctcttagcctggctcttctgcctaacctcttcctgcctagctattgaccagttcaccctttattagaatcaattagagcagcacacattcacagtgtacaagagaattattccatagcatttccccctttttgtctaattaaataggaaggttgactcactcactcagtagagcatgagactttttttttttttttttttttttttttggttttttgagacagggtttctctgtaggtttggaagctgtcctggaactctctttgaagaccaggctggccttgaactcacagagatccgcctgcctctgcctctcaagtgctgggattaaaggcatgtgccatcaacgcccagtgagcatgagactcttaatcccaggatcctgggtttgagccccatgttaggcaccagatgttgcatttatctaataattctctatcaataaaaaacaggagtcagatatcgaggtaagaacctgaatgatcagagcagcatcggtgaagtgaccaatgacttcctgtctcttccattcctccattcaaaaagactgagatcctctctatgccccgccctactacttcctgtctctctatctgtcctcagtcctctaaaacctctatgattaattttggtccgctagtagctagcaaccccctttgattcaaagcaaactttattgtcagaatgtgatcaaaatatcacacaacatataagcaagcagatatctgtgagtttgagaccatcctgatcttcatagtgagctccaggtcacctggagatacacagtgagaccctgtcttaaaaaataaatttcagaaaagtctctaaaactaaaccaggtgtggtgacatacttgaataatgagcacttttatgttttctttgcttctcatctcacagggttagggttcagtcccagagtctaggcaagccagtatacctctgaacaggactgattgtctcagtcctgaaactcttgtactacacttgttataattatattcaggcagccatattgcattccattaacttcatgggcttcacagccacctaccacatcatagtcttccaatctgaagtttcacgttttttcatacccatacttacttatggagttggtttcatagatttaaatggataggtttttttttctcctattctagttcatctactctcatccagccttccgtatcccaacatgctttaagttctttgtgttcttttccatttgttcatgaaccttaagaatattgtaaatatgaaaattcccataaagttcaaagtacaagaacctgacacatggtaagcctttagtaaacatgtgcaatacttctatcatcatcctaacaccaggtacagtgtctgtgcctgactagaccttcagtaactattcattaatcaatcaataaatgactagataaaggttcattcattggtgaaatgaatgaataccatcatataatgaatctgaagattcatagtttttcaagagtgtgtgtgtgtgtgtgtgtgtgtgtgtgtgtgtgtgtgtgtgtgtgcgcgcgcatgcgcgcgcgcgcgcgtgtgtgtttcaagataggatttctccgtgcaacagaattctagctgttctggaactcactttgtagaccaggacagccttgaactttcagagatctgccttcatcttcctcctgagtgctgggattaaaggcatgcactaatcgctgcctgacaatttatatatttttatttcatgtgtatgagtggttccctgcatgtaagtatgcgcagcatatgtatgaatggtgtccacagaaaccagaaaaggatactggctcctttagactggagttacagatggttgtgagctgctaggtaggtactaggatccaaacataggacttctgcaagagcagcagtgtttttaacagctgagctatctctcaggtcccagaattataacttttatattgtccatttttacagacaaggaaactgagacttggagaggttaactgacttagcctgggccacttacctggaaaatgatagaaccagggctggaactctccgatccccatcatgtgactagcctcgccctactctgcttcctcaaatgtatgttcaaatcaagagatcccataaggcttcccgagatgtggtttctcctgttgtgaccctgggacacaggatgtggaaagggcccagcgatggggagtggagtgctggaagcctccttctttcctcccctctgggcctctcatgtttcctgtcctaaactctgctctgatatttttcccaaggaactaacagcatggtgtgtccctaaggagagagttttggggccagagagccaagccagggaggtgactccattgctagccaagacaggggtcaacagactcaggggcccagaagagtgggtgtaagaatgaggagatctgcaggagacatgtggttgccactctgcagtcctctaagtaaaaaacaacagaagtcagtggtcctcttaggagctggacatggttgtgctcacttttaatcccagaactagggaggcagaggcaggtgaatctctgtgagatcaaggtcagcctggttaacattgagagttccaggacagccagagctacactttgaggaacacacacacacacacacacacacacacacacacacacacacacacacacactcctcatattgcctattcttaggacaatttgaggcacaatagtgacaataatgtttactgagtgtcatctttgtgccacttactctattaggttgagtgtctttcaaaatctcacagctagttttatgaaatagataataaatatgatgactacccccttttctttcttatttccctctttccttcatttacttcccttctttctcaaataaggaaccaagcccaaccaaatggtacatacctacagtcccaaaagacagaggaccagcctcggatacacagtgaatcataaggcagcctggccacatggcagcacctacttcttgttcaaagctgtaactttttcttaagatttattttattaccaggcaatggtggcacacaccttcaataccagcactcgggaggcagaagcaggcagatctctgtgagttcgagaccagcctggtctacaagagctagttccaggacagcctccaaaggcacagagaaaccctgtcttgaaacccctcccccaaaaagatttatttatttattcattcatttatttatttggattttttgagacagggtttctctgtagctttggagcctgtcctggaactcactctgtagaccagactggtctcgaactcacggagatctgtctgcctctgcctctgcagtgctgggattaaaggcgtgcaccaccaacaaccggtttaacattatttttgtttatgaatatgtgtgtgcatgcacactcatgtatatgtattcacacatgtgtgcaggtacccacagaggccataagagggcttcagatcccctggagctggaatcataggtgcttgttaccacctgatttaggtactgggaactgaactcgggtcctcagcaagggcaacaagcactctaaactgctgagccatttctgcagcccttaaggcctataactgacagaagacaaaactgaagtttgaaactacacaagcttttgaacccttcagagctgaatgactatggagagtgtgaactatggtgcagaataaaaaccctgtgttgtttgtgtgtgtgtgtggggggggtacgtttgtgtgcacatgagcatccaaatgtgtgtgtgtgtgtgtgtgtgtgtgtacatgtgtgttatgtgtatttatgtagaggccacaggttgatgtctggtgtcttccttggtcactctccaccttatgttttgagacagagtctctcttattgaacctggatctcaaagattcagctaggctggctggccagcaagccctaaggagctgctgctatccttacctcccctgcacagggcttacagacaggtaccactctactctgattttcatgtgggtgctggggaccaaaactcaggtcctcagggctggaggagagatggctcagtagttaagagcactgtttgttcttccaaaggtcctgagtttaattcccagcaaccgcatggtggctcacaaccatctgtaatgagatctggtgccctcctctggcctgcaagcagcatgcaagcagaacactgtacacataataaataaataaatcttaaaaaaataaaaactcaggtactcacacttatgtggtaagtacttcaccaatgaaccatctccattgcctcagaaagttctctattctttaagcaagaattcagtacatcagtatacagcttcctgtgattgtggtcagatgtggtgctggggaggagagttctccaaagaggctgttgccctgacctgatctgaaggctggaatgaaaggactcttgccattcctggtggtcagattggatccccagatttgtttttttgtttttgtttttgtttgtttgtttgtttagttttgttcagggtttctctgtgtagctttggaacctatcctagcactcactctgtagaccaggctggcctcgaaatcatagagatctgcctgcctctgcctcccaagtgctgggattaaaggcatgcgccaccaacactggctggatccctagatttgtatgaagcggctgtaaagtgtgggttgttcccttgagaaaaagagctccagggctggctggggtgggaaaggaagcttcaggggtatccagccagagttaagactattcactcagtgcctagcccttcaacaggaagagctctgtgactcaggtgatcctctgttggggctaaggcaagaactttccaagaaacaagagataaacaacctaggaaataagtacttggggcagccagtgccacctgtgaccccttcccgctgtctctctgcctgtgggtttctagccacctcgcgcctacactgctctttctgtatccatagctgtctccttggccttgccagaaccttcctctgggctcattctcctctcacacaccaggcctctgtctgctgtggcagctcttttgtttacttccagagctcccaggcacactactagccaaacacaacgaagccaagccagagagaactctgttccagactcagtcttgcccctctgggacaggtaatggcctccaaaccaaggaggcagctcaaaagagggctgccccctacactgggctcttgcttcaggtcctgacaacccaaagggaaaggacacaagacctgcccattgttgggcagggatccctactcttgagacagctttggctggcagccctgggaatcaaagacccagctggagagaggtggggaaaattttgaggccctctgggtgggaaccagagacttggacttttggtcttgtgtgtctctttagccaggtagattctgaccttgagccctcctctctgggatccaggtgcctaaatttccccaccagaggactgtcctctccaaaagttcatgtcccatacctcttcaaagattctagtgaagaaagggaaatgagcatttactgtgggccaagttccaagcaggaagcactgtgaggatatgcctggcattttctgtccgtctgaggtcaacagggagatgggtgattggtatgtaattatgtacttgtataatgtaagatgtaaagggaggactcaacttctgactctgaacagtcaagtgcttcgatcacacagagccagagtgcagcagaggggtcccaggtcagatcatgctggtcatgccagaacagtggccaatggtagaaatgaggtaacaccatagggaggaggagacccatggcagcccagattcttcagaggaaaaaagcagaggaccccttcagtgagacccagtcaagtctgtgattagggacactgggggacccaggattgggcaaatgctggttaacgaagtggagataatttgaaaggaaaccagggccccctccccactcttaaggcttcattttggagaccgtgaagttgattaaggaatgtaaaactctaactctttgctaggccccaatggagcagaaggagctggggaccaatgggcctttggaaggatcaggaatggggttagaggtgagcactggccatgaccagctgtactctgggcctcattctgcttcagttcccaggagtgggggtggggtccaagcctgggaaacagttcatacctgaggcaacctaccttcactcatagggttagcaattctgtaaggggtctggggcccctggagtaaacaagaaatccgctacaactttaggcatgaagattcagctttttatctcatcaacgtacattttagtctaacagtctaataggctcatactctacccaagtcctttacccttctccaccagcccaggcaaagagcatctaatctgccctacgggtggaaagtcaccaggcacaaaggtaattcaaggagggggtggcactgcggctgtcccatgaagcgcttaggatatcaccagctcctctggagaccgaggaggccggagcaggagggatgatggcccgagtctcctctcctgggtcccagtcccactcagagtctgttctctgggcctgtcactgcctgtcagaggagcagaagggcaggaatctccagatggggcacggttagcccagatcacacccagagagtacatccattgaaatcccctttcctgcaggctgtcgggatacttcacaacccctctgtgattccaggagcatgtggaggggttctctctggatgtgccaccctggaagacagagggccggtgctgctacctgcagccacaagattccacgaccatgtcctcgtactgtttatacaccacgttgttggcagagtcaatgaagaggatgctaatgggactcagccgtgtgggcacacagcaggtgggtggtgtggattcagggtccatagaattcatcagggtctggatgactgcatggtttgtgggctccaagtgggagcgcaaggggaactcgcatagtccttcgcaatggaaggcttcgtactcaaggggtgcaatgatccagtcgtcccagcccatgtccttgaagttgacatgcaaagctttgcgactgcagcgagccttgaggttcttgctcggtcgcttgccctggcgattggccagtggggcccgccgtttccgccgctggctgaacaggtattcatacacagtcttgtcatcctggccagagcgggccttaatctcattaaagaacaggtcccgtttcttagtacgaccaaacaccaggaacagggccttctcgtggacttgtcgggcagcgcgttcaaagcccaggccgcggaggtccacagcccggccccgttcccaggcctccagctccaggcacagctgtgctgagttcttaaaatttcggaagagtttccagatgtcgaacacctcccagccagatccatccaggcctggcacggagcgcacatccagcaaggctgccggctgccggccgctggggcagctggacagcttcagctgggcaacccgcccgctactggggaccgctggcttggccatgtccaagggcttcttccgtaggatccgcagttcagcccccaacagcccatccttctccagagcactgatgtcaaacacgtacctctgcttcctgaccacagggcctcggtcatctggagaaaacagccggaagtcaattcttgtcacttcaccaagatagtctagcctgccacctcggagcctccagggaggacctaactctctcccactcaaaagacattcctttaacctcttccccactatggccaaagccaacacccaaaccaccaagagcccttttccaaatgaaggtaggtgtgccactttgcacgatctcagtgccctcgccattcgtgatctgtatgagagccatcaaacagtataccggtgtccgccccacccatgagcacattattatctcccatacgtaagacaggtgatatgtgcatttaaactacccactcttccagaggaggaacctgccgctcagagtaagttaggggactcattcaatgtcctctacctgggggaaagtagaaatagaactgtagcctagaacttcaatactcctttcgagcttcctccacctgaaggaccttagcgtttttgttctgggcaaggcacagagttggggagtaaattgatgtaggtaacacagcagattaataacaaagcccatctgcaactcaacttccctagtttccagtctgacaattttgtgtccatgagtgtggttcgtgtgtgtgtgtgtgtgtgtgtgtgtgtgtgcgcgcgcgcgcgcgcgcgcattcgcgtgtgcaattgggttcccgagtgagtataaagtaatatatatgctattggcacatgcaagtacagttgggcttcaatgagtacttgaaaaatgatgatatatgtatgtatgcatgtttgtgattcgtttaccatgtgtataaaatacaaggctctgtgtgtgtgtgtgtgtgtgtgtgtgtgtgtgtgtgtgtgtgtgnnnnnnnnnnnnnnnnnnnnnnnnnnnnnnnnnnnnnnnnnnnnnnnnnnnnnnnnnnnnnnnnnnnnnnnnnnnnnnnnnnnnnnnnnnnnnnnnnnnnnnnnnnnnnnnnnnnnnnnnnnnnnnnnnnnnnnnnnnnnnnnnnnnnnnnnnnnnnnnnnnnnnnnnnnnnnnnnnnnnnnnnnnnnnnnnnnnnnnnnnnnnnnnnnnnnnnnnnnnnnnnnnnnnnnnnnnnnnnnnnnnnnnnnnnnnnnnnnnnnnnnnnnnnnnnnnnnnnnnnnnnnnnnnnnnnnnnnnnnnnnnnnnnnnnnnnnnnnnnnnnnnnnnnnnnnnnnnnnnnnnnnnnnnnnnnnnnnnnnnnnnnnnnnnnnnnnnnnnnnnnnnnnnnnnnnnnnnnnnnnnnnnnnnnnnnnnnnnnnnnnnnnnnnnnnnnnnnnnnnnnnnnnnnnnnnnnnnnnnnnnnnnnnnnnnnnnnnnnnnnnnnnnnnnnnnnnnnnnnnnnnnnnnnnnnnnnnnnnnnnnnnnnnnnnnnnnnnnnnnnnnnnnnnnnnnnnnnnnnnnnnnnnnnnnnnnnnnnnnnnnnnnnnnnnnnnnnnnnnnnnnnnnnnnnnnnnnnnnnnnnnnnnnnnnnnnnnnnnnnnnnnnnnnnnnnnnnnnnnnnnnnnnnnnnnnnnnnnnnnnnnnnnnnnnnnnnnnnnnnnnnnnnnnnnnnnnnnnnnnnnnnnnnnnnnnnnnnnnnnnnnnnnnnnnnnnnnnnnnnnnnnnnnnnnnnnnnnnnnnnnnnnnnnnnnnnnnnnnnnnnnnnnnnnnnnnnnnnnnnnnnnnnnnnnnnnnnnnnnnnnnnnnnnnnnnnnnnnnnnnnnnnnnnnnnnnnnnnnnnnnnnnnnnnnnnnnnnnnnnnnnnnnnnnnnnnnnnnnnnnnnnnnnnnnnnnnnnnnnnnnnnnnnnnnnnnnnnnnnnnnnnnnnnnnnnnnnnnnnnnnnnnnnnnnnnnnnnnnnnnnnnnnnnnnnnnnnnnnnnnnnnnnnnnnnnnnnnnnnnnnnnnnnnnnnnnnnnnnnnnnnnnnnnnnnnnnnnnnnnnnnnnnnnnnnnnnnnnnnnnnnnnnnnnnnnnnnnnnnnnnnnnnnnnnnnnnnnnnnnnnnnnnnnnnnnnnnnnnnnnnnnnnnnnnnnnnnnnnnnnnnnnnnnnnnnnnnnnnnnnnnnnnnnnnnnnnnnnnnnnnnnnnnnnnnnnnnnnnnnnnnnnnnnnnnnnnnnnnnnnnnnnnnnnnnnnnnnnnnnnnnnnnnnnnnnnnnnnnnnnnnnnnnnnnnnnnnnnnnnnnnnnnnnnnnnnnnnnnnnnnnnnnnnnnnnnnnnnnnnnnnnnnnnnnnnnnnnnnnnnnnnnnnnnnnnnnnnnnnnnnnnnnnnnnnnnnnnnnnnnnnnnnnnnnnnnnnnnnnnnnnnnnnnnnnnnnnnnnnnnnnnnnnnnnnnnnnnnnnnnnnnnnnnnnnnnnnnnnnnnnnnnnnnnnnnnnnnnnnnnnnnnnnnnnnnnnnnnnnnnnnnnnnnnnnnnnnnnnnnnnnnnnnnnnnnnnnnnnnnnnnnnnnnnnnnnnnnnnnnnnnnnnnnnnnnnnnnnnnnnnnnnnnnnnnnnnnnnnnnnnnnnnnnnnnnnnnnnnnnnnnnnnnnnnnnnnnnnnnnnnnnnnnnnnnnnnnnnnnnnnnnnnnnnnnnnnnnnnnnnnnnnnnnnnnnnnnnnnnnnnnnnnnnnnnnnnnnnnnnnnnnnnnnnnnnnnnnnnnnnnnnnnnnnnnnnnnnnnnnnnnnnnnnnnnnnnnnnnnnnnnnnnnnnnnnnnnnnnnnnnnnnnnnnnnnnnnnnnnnnnnnnnnnnnnnnnnnnnnnnnnnnnnnnnnnnnnnnnnnnnnnnnnnnnnnnnnnnnnnnnnnnnnnnnnnnnnnnnnnnnnnnnnnnnnnnnntttaggtgaaaataattacccacacacacacacacacacacacacacacacacacacacacacacacaaacctgcaggtgctcagaaaaatcttttacaaacctgaactcaggaattggaaacggaattccaacccaaaccaatttaattactctctgatgtcatgctgtctaaattcatttaagtgcgatatatttatgtgaaaaaaatcaccactgccctttagaggccacgactcacgggggctcttggctcagagccccacagcgggactcaggcttagggggcctcccaaccccagaacagacttaggggtcttcacctccacccgctggagcagcccaccccaccatcctgagcagagatgctgaggaatgagttgcaaagacctgcaggcactaggtatgcgagttaggtttttcagtgaagtccgaggagtgtctataaaacagtttcaatccctctgtctagtctgggacctggtgtgtgcgtgcgtgtgtgtgtgtgtgtgtgtgtgtgtgtgtgtgtgtgtgtgtgtgtgtgtgtgtgtgggtgtgtggggggggccgcggaggcggnnnnnnnnnnnnnnnnnnnnnnnnnnnnnnnnnnnnnnnntgttgtgtgtgtgtgtgtgtgtgtgtgtgtgtgtgtgtgtgtgtgtgtgtgtgtgtgtgtgtgtgtgtgttgggggggcagcacagatggcagcatttacccacagtttcttttattttaataaacttgtgacccagaaacagaaaaaaaaaaatagtgcccattataccacccccaccaaatgccattcgctaagcactgccatcctgtagcccccttggttgaaaacaggtccagagtgagtgtacacaggcaaagaccgccagttttcttagaagaaattggctggggccagaggtagcagcccctgcctaaggcagcagcgacccctgcaggaagttggaagagaaagttctcatggactacttgtgtaatagctggtggagaaagctgaattcctgctcaactcaagagtgcccctcgccttccttttcttcttcttctttagacaaggtctcatgtagcccaacctggcctcaagttcactatgtacccaaggctagccttgagctcctgatcctacacctaccagagcctgagatgacagatatgtggcaccacctagctacaagggtttcctaaaatgccttgctaaagtatttaaacaccctttctttggagattccgtgttatagagccctgggaaacttactcagggtcaaggagaagggggagtgaaaccccaggcctccctcaagtgtgataggcaaacactaccgcagagctccacccctagtccagagtctcttcccttttcttgagacagtctcctgtggcgaaagctggccttggacttgcaatattagctgaggctgccctggaagtcctgatcctcctacacccacctccttggttacagcgtgggattatggaactgtaccacctgccctagccttcctttattaatcctcaaatcttgcagctgacctaacagatccattcacacgctaaagttggtttctagagactctctgctggagtctaggcatgtaactcagtagtctcgtgcatggttagcatgcacagagccctcaccaagacaaccccaaacaaagtcctcactccggatagctaagtggctgcaagtctattttcttttttaaatattttactttgtttatgtgtatgtgtgggaagagggtgccacaggagaccagaaaagggtattaagtcccttgaagctggagtggcaggcagctgtgtgccaccctgacatgggtgccgggagcagaattctgtccttccccaagcagaaagtactctttttcataatgttgttcctggttcacttactcagccactccaagtttcattgatagctccaggtctgaagcctggacttccaaggaccaaggcaccacctgctttcttcagcgagcttggaggatggcttgaactcattacagtccctcaagtcatccaggcccagcactcttgtctttgcttctgacttctcttcttactgtcctctctggcatcttcctcctacagtctctgtcactatcctgacccttctcacgcttttacctgccacatttcccttagaactgacttcttggtctccaggacctcttcgtccctaaccccccccacccacaccacacacacacctaaagcctacccactgagcaagagctgacccagctgctacttgacacaaagtcaacgcttactccccaggaaaggcatgaagcttccaaacaacaccacatacctgctaggtttctttctgctcttagagttcaaatccacccagccacagcccttgctccatctgcaaggtagttcagtttttcacagtctgtttgtttttttcatagttttattttaactgaattccttatgcctatcataatttatgaacatatctgtctatcccattagattataactacactgtaccatatttgtctttcaattattcccaggccttggcacagagcccagcacagagcagattctcagtgtgtgttgtatgaatgactctcagactggcccttttaaagaaacactgtcattttcttttttatcatttctttttaaaaattagaataaataatgggtttcattgcgatattttcatacttcatattattacactttggtcatattctctcccctatcttctcccacaactcagactccttcttcgacaaaagtaccctttctactttcctgttctatctccatatatttaaatatataacttctgcataagaaaggaaataattggatgttcgtgtcccttcccccacctccattagtttactgttcccacatcttccagtagccactggtccttcttctgctttcaagtcatatatataaatctagatgctaatataagagaaggcatgtgttatttatctgcaaagccatcattttaaacattccccgccttttctactgtacttgagtccctaaaagggagagacgctattttgctaccaagaattttctaagctctatcctctggataaacaaagctatgaaccagtccacgtagacatccaatgagtggttgataaagatggaggttctgcaggcaggtctgggtttgattcttggtggttctgctatttatacactgtgtgatgccggagagccttccaaccactctgcagctctgagcaggggtaatgacagtactgtcatacaaagagctcctgtgggtatttggtggagtgaattattaaaaacctgagaagatagctggagacatggctcagtgggttaaaggtgcctgccaccaagcccgacaacctgagcttgatcctcaggtcctacaaagtagaggagcaaacagaaccaactttcacaagctgccccagtccccacctctctgaacacatgcacacatacacacaaaataaatactgtgtaatgttttaaaaactctgataaatgttagtaacagctacaccttgaggacatattctccatcagatactggcttgtgttctattacttttaaaaccttacttcacaaccacaccccactctgaacaacttttgctgacgatccttttagcctccttcgttttacagacaaataaattaaaagtttaaattacttttaaaaattatttctttgtgtgtgtgtggtgtgtggtgtgtgtgtgtgtgtgtgtgtgtgtgtgtgtgtgtgtatgtgtgtgtgtgtgtgtgtgtgaacatgtgtgtttggtacccttataggccagaagaaggcactgaatcctctggagttcaatttgtaggcagttggtgcaggttctgagaactgagttcaggtcctctccaaaagcagtcagtgctcttaactactgagacatctgtccagcccagctcacaaacttatttatcgttactatgaatgtgcatgcatgggtgcatgtgtcccaccacacacacctggaggtcagagagcacctttgcaaagtctgttttctccttctgcctttacttgggtcccagattgaatttaggccaagcttttgtgacaagcaccttcacccgaaagctgtctcactaccccaagttacttttgaagctcactttctgcttttccaagttttgttttgtttttgttttacaagacagggtctctctgtgtagccctggctgtcctggaactcactttgtagaccagctgcccttgaactcagagatctacctgcctctacctccagagtgctgagatcaaagaagtgcgccaccaccacctggcaaacttgaactcgtgaatctccttcctctactctgtctagtaggattgcaggtgtgtattactacacccatccctttccccatatttttaaaaatgacattaaaattttttatttctctttctttctttctttctttctttctttctttctttctttcttcctttctttcttgtttttgagatcaggtctcactatgtacctctggctgtcccggaatccactctgtagaccaggctggtctccaattcacagagatccacctgcctctgcctcccgagtgctgggggatcaagatctagcttaacattgtatttctgtttatatgtagtggcacacagaagtcagggaataacctgggggagttggttctctccttccaccacgtgggtctccaggaccaaactcgggtcatcaggttagagcgtcatctttatccactgagccgtctcaatgaccctttaaagcacattatgcaagaatctcgctctagaaagtggtcataagtgataaggtggtgtggtggggacactagggaatttaactttcagccacggactcatccagcggtctggaacttggaggacacagaggagtctcagacaggggctattgtctgaagaccaggttgggtaggagcaaggaaaaaactccaaatctggatggaaggccctctccagggaggagcccagagttcctgcctggctcttactataaaggtgactaatcactttggtcccctctggtaattgcaaccagatgctgctgctggctatgcttcagtcccgacatgtttaattactgggacacagagtctctgggtcccctgtggctccctccctcccccattcctgtcagcaatattaatgtcaaacctaaggtagaggatgggagccttgggaagccactggcatggaaataatctttacaggcccttccactatgtaaagcctttaatttctttaaatatttccccatccattatctcattggcacctcacaaaacatccttataaagccagtaagccaaagtattactagacaaacagagagtgaactgaagaataataatcccttgttttattcaaacattaggaagtttcaaaggcatttcatattccttatgttccctcaacctcccaaggtctcaagttagaccaacagggcacagtagctgagagatggactcaaggatggaatagcccagtttatgtcccagctctgccactttccagttgaccggccttgggtattcatccgtttacttaattatgagcactaactatataatagtgatcaagacatcaaagtctgtgttcaaatttcggtgaaagagacaaataaatgcacagtttgaaggaactataagtgctgtgtgggaaacaaaacagttgatatagtgtctgttctagcaaggagtgtctcaccgaagggttgtgtgttggcagagatggagacatagggaggcctcctgaggtctgcaagatgatcattccagatggagggcccagcatatgccaaggccccaagttaggaatgtgctgggtacaagtgagaaaccaaggaaagctggtgttgctaaagcagaaagagccagggggttgaatcatatgggagatcaagtcagacatgtcagaaccatatcagtgtggctttgtaagccatgaacagtgagttcagttgtatttgtagtgcactggagagtcaagcaggggattttaggcagccgagatgtcacataataactaatacaaagctaccaaccttcaaataaacccagagcctggattcacaaattatgtgatctcaattaaattttttaaaccttcataaacagatttattttattgattgatttattcattatgtatacagtgttctgcgtgcatgccagaagagggcaccagatcttattagagatggttgtgagccaccatgtggttgctgggaattgaacttaggacctctggaagagcagtcagtgcttttaaccgctgagccgtctctctagccctcagttaaattatttgatctcactgtaactcagtttagtaaactatatgacaaaagtaataataaaatcttttgggggctggagaaatggcttagaggttaagaatgagtactgcgtttccaaaggacctgagttcacttcccagcaactacatggggtggctcacaactacctgtaactccagctccagaggatctgacaccctcttctgactcctcagacacatgcatttaaacatggacacatcacatagagacacacacatatgcacataattataaataaattaagtattttgaaagatgaagtatggctgaacatgtggtgcaggcctttaatcccagcactcaggaggcagaggcaggtggatctctgtgagttcaaggcctgcttggtctacagagtgagttccaggacggccagagctgctacatagagaacccctgcctctgccactctagagcagttggttctccaaggtgcccactgcccccccacatcttcccgcctgcctgcatctggtctgtgatcaagcgttcagggtggagagacaaagagctgtatgcctctcagcaacacaagcacagaagaaatgggggggacagggtgggaaggaggggaaccttctgagaagaaaagtggctgtgggttggtgcctgtctgtgtacagggggtgattgtaggcagagctgtcatgcatggttgtacaagttttgcactaattaaggatgcccagttttagatgggtggtggtggtgcatgactttaatcccagcactcagaaggcagtgccaggtagatttctgtgacttcgaggccagcctggtctacagagcgagtaccaggacagccaggactacacagagaaaccctgtctcaaaaacaaaataaaggaaggaaggatggaaagaagtgtggtgtgtggtgtggaggtgcctgtctgcaacattagcacttatgttaccagtgggcagaatctgggtcaggcatttttagttcttgttttaggttcttgactctgtgtgtgtgtgtgtgtgtgtgtgtgtgtgtgtgtgtgtgtggttagctctggctgtcctggagttcatagagatctgcctgcctctgcctcccaagtgctgggattaaaggcatgtgccaacaccgcctggctctacagcgccatcttatggaagcattttcttgaggttcctgcctctcagaaaactttagcttgtgtcaatttgatataaaactatccagcacaatccccatcaccacataaattggtatggtggcacttgggagctggaagcaagagaatcagggtcatccttagccttggctggtctggagcttgctatgtagaccaggctggcctcaaatttctagtgatctgtctgactatgcctcctgagtgcatattaccatactcggtggttcttgacctcttatttaagggattgagataaaggctcacaccaactgcaaaagcaacaaggaaattctccaaagcagagcaatagaataggtcaatacaatgtcaacagtggtagcgggggccactgagttggttttgtgcctggtaaaagtacttgctgtgcaagcctgatgacttgagtttgatccccagaacctgcataaaggtagaaggagagaactgactccaacaaattgttacctgtcctccatatgggcagcataacactcgagcccccactattatattctatcaaatgcaaaagttattcaaagccagtgcatagtaagctatataagaccttgtatcaaaaaggaaaggaagaaaaaagaaaagggaaaaagaaagagaaagaagaggaccaagggagatgcctaggtggttaaaaacatttagtgctcttccagaggctaagaacactaactgctcttccagaggacctaagttctgttcctagcaaggatatccaggagctgtctaaactcctgttaacttcttcttgaagggatctggtgcctccttctggcttctaagggcactgcatgtaggcagtatactacacacacacacacacacacacacacacacacacacacacacacactcatcagtaagaaacaaaaaaaatcaaattatctgacatagttgtgtgaggcaagaggatccccaagctggaggtgagtctatatagttgacacaatgtttttttttttttaatctactgcccccccccacaaactcctacctcacaggtaacagttagggacctggaaaactttcttgccatttgttttgtttgaggaaggatattgtgtatcccgggtgcaaagtcccagttggtcttgaccagtttatcatgctgcccttactgctgggttgcaggtccatgctaaaatatttagcttctcgacatttggggggggggggaaggggacaacgacagggtttctctgtgtagctttggagcctgtcctggaacaggctttgtagaccaggctggccttgaactcacagagatctgcctacctgtgcctcgggaatgctgggattacaggcgtgagccaccgcactgcttactccttgccattcttgagctcagaaacctcagattcttgcttggtttcccttcctaccatcctccttccattctctccttcctccatctgacttctaaaagtcttctgctctgggatacaaggagaacactgaggcaggttgtcctttgggggtaagaaatctcatagaagagttatcagcaccatggacagatagttagcagtactgcaggggctctaaggagagctcaagcacaccctgcagagttggggggggcgtcccttctcataggcctcagaggtagggggttccttctcatgggcctcagaggaaaggaggtctcatagcaggagctgtcagctggggtgtctgattcctagatggcataggagagaagggatgtgccacattgaggagatagggaagtgaggaggacatctagttgaggtgtacccattatataggtcagggtatgtgtcaccactggtagtcctggaaacccattctgtaaacttccttggggtggtgagaatggtaccagtcagactcctggaatcacggtacctggtgaatctgtttacagactcacagacaggctctccagcagggatcacagagccaaccacaaggatggagacagcgatggctatagataggcacaactagagcactatatggtctgggattctttttttttaagattttatttatttattatgtatacaacattctgcttccgcaaatatctgcacactagaagagggcaccagatctcataacggatggctgtgagccaccatgtggttgctgggaatggaagagcagtcagtgcttttaacctctgagtcatctctccagccccatggtctgggattctaatgattcaaaaaaagaaccctagagtagtgtcaataaggtggatcacaggtaagggcacttgctaaactggacaacatgagttcaattccttgaggccacataaaaggagagaactaacaccaaataaataaataaataaatgtaaaaccaaacataaagcaaaacaaactccaaaccccaagaaccccagttgacatgtaatcgataagaagtttaagaactttattagctgggcaatggtggcatactcctttaatcccaacactggggaggcaaaggcaggtgacttcctaagagttagagcccagtcctgtctataaagtgagttccaggacagtcggggctatatagagaaatcctgtctcaaaaaaaacaaaaacaaaaacaaaacaaaactgaaagaaatagcatagcacctcatcttgaaatttcacatacgtaatttaaaaaaaaaaaaagaggaaactagaacaataagtaagtttgatacagggtcaccattggacctgcacagaaggtgatttcccagacattcaatttaggatgtaaaagatgtgcagtttgcctgaggtgactggggtccgttatcctttaactcatccatttctctctctcctctccttcctcctcccaagactttttaattttctccttataggcctttgtccttccaaactatgaacacccatttgttgtcccaaatgtcccttgcactgtgcaggaagcccaaaggctcatgtatccactatgtgcccagactatctctaggggacagtgtcacccacttttccacatcaggaaccccactttctgctttggcccaggtagttcccagtggtaccacttaatatttttatagaattttcaacaggttgttaacacattgtgttattatctgataatagaacataactgctcaataaatgcttgctgggtaaatggataaattaataaggacaggaaagactccccatttacaaagctcaatgattactgtttgatattgatttcctactttattgacccccttttattggtatattttggtaatctgaaacctatatccactccctaaagtatgctggcagtttgctgatggattttctgttttaatttttggttttcgagtcagggtctcatgtagtacaggttggctgtgaaactctttttgtagttgagaatgactttgaactgctgatagcctggcctccacctctcaaatgctggggtaacaggcctgtccactatgccaagttctatcagacccagagcttcacaaatgctaggtaaacccactaaactgagccacactcccagcccctgctgatggatttttaaaaaagagttacttattaattatgtgtatagaattctgcatctatgtatgcctacaccagaagagggcaccagatctcattctagatggctgtgagccaccatgtggttgctaggacttgaactcaggacatctggaagagcagtcaatgctcttagcctctgagccagctctccatgcccctgctgatgcgtttttatctcagtaacttttttaaacctgaggacagcttgacttatccagttcaatggatacttactaaacacgtgtcagactacatgagaaacactctcataacttcatgaagcttcaatttcataggggaaaagtatgaaaatggtaagtcagtaaataaaaagtagaatgactataaaagagacagaaaagcatgatgggaaaacatagggcaagtcttactcttcaaaaattattttattagggctggtgtgtgtgtgttcgaacacacatgcacaggtgtacatggccttggcatatatatgtacaggtcagaaggcaacttttggaagtcagttcccctcttctactataggttcctgggatctaacatgctgttcaggcttgcacttttacccatctcagccgcttgagcttcactgtagcaagcatgtgagggaaccattagagacttagacgacctagtggcccatgcctttagtcacagcactcgggaggcagaggaaggtggatctgtgtgagttcaaggccagcctggtctacagagcgagtgccaggatagccagggctacatagtaaaatcctgtttaaataaataagtaaataaacaaacaaataaataatgccagttaagccaacagctgagagtaaggtaagagagggggggtgtagtgtttatttaggtagagggtaaaatatgtaaaaaggcctagaggcagaaaagatcaggtatgtctaacattaaggttgttttttttttttccaaacacagtaacagagttttgttttgtttgttttttgtttgtttctttttttgagacaggaacatgtcctggaactcagtctgtagaccaggctggtctccaactcacaagagatccacctgcctctggctcctaagtgctgggattaaaggcaggcaacaccacctgctagcaacagagaccattcttgcacaggacttgggggttgttttcctggactgagcgctcactacagattctttgcagctctttctccagggtctggagatgtttcttcttcctgctctagatagcttgtttttcggaactacttgccttttcaatactccaccacacccctcaaagtaaccattaaagggccagcaagatagctcagcaggtaaaaggcatttgccacagagttcaatgaccccagcttgctctctggaacccacagagtgaaaggagagaaccgactcctgcaatgtcttctctgacttcacatgtgtgcattcacacatgtacacataaaaaattttaaatttaatgtaataaattagggctgagctgggcagtgtgggaacactcctttaaccccagtatttaggagacagaggcaggtggatcccagagtccgatgctagcctgcactacagggtgaattccaggatagccagggatacacagaaaaaccctgtcttgaaaaaacaaagtttcttatataaaggatataaatagagggctcaaagggtaagaatgtttgctccccaagcgtggaccttagttcagatccaatcacataaaaagctgtgaggaacttacaaagtgttcccttctcagattccctttgtgtcttaactcttctccccacccctctctcttgcttttccagacagggtttctctgtgtagtctcgctctgtagaccaggttggcttagaacacagagatcccctttcctctgcctctccagcgctgggattaagcatgtgccaatccaccacccagccaactggttctcttgtgtacacacaacttgtacaacttatacattggtttactcaacacttgctgggtatctgttttgtaccagcctcctctgtcctcaaggagctcagtcttttgtagtgcccacagggcaaaatcatgttgggtatttgcaataatgagattcctggcttcatgcttggtgtactgagtcttcagggatggactctaagtggacacttaaaagttcatttctggccaggcattggtggtgcacgcctttaatcctagcacttgggaggcagaggcaggcagatctctgtgagttcgaggccagcctggtctccagagggagtgccaggataggcttcaaagaaaccctgtctcgaaaaaccaaaaaaaaaaaaaaaaaaaaaacccctcaagaaactagaaatcaaactaccaaataatctaattaaaaagtctaattaaaaagtggggtacagatctaaacagagaattctcaacagaacaatctcaaatggcagaaagacacttaactaaatactcaacattcttagacatcagggaaatgcaaatcaaaaccactctgagattccatcttgcagcgatcagaatggctaacatcaaaaacaccaatgacagcttatgctggagaggatgtggagaaaggagaacactcctccattgctagtgggagtgccaacttgtacagccgctgtgaaaatcagtatggtgatttctcagaaaattagggatcaacctatctcaagaccctgcaaaaccactgttgggcatatacccaaaaggaggcacatccacaccacaaggacatttgttcaacatagcaacattatctgtaataaccagatcttggaaacagcctagaagcccctcaactgaagaatggataaagaaaatatggtatatttacacaatggagtgctactcagcagtaagaaacaatgacatcctaaaatccacaggcaaatggatagaactagaaaaaaacatcctaagtgaggtaacccaaaaccagaaagacaaatatagtatgtactcactcataagtggataccagacataaagcaaaagatacctattctacaatccataaccccagagacgttagaaccctcttccagaaggagatggaagcaggtgcagaaatccacaactaaccattgggctgagctcctggagtacaatcaaagtgagggaggaacgataataaaaggagtcaagaccatgatagggaaacccacagaattagctgacccaagttagtgagagatcactgacccaggtctgacaaatggggaacctgcataagaccgaaatagactctcttaatataggagacagtggtgtgactgggacaatatatgaggccactggtagtgggtccaagatctaacagtaatgtacaaactgactcagtggagcccattctatatggagagataccatgcccagcctagacacaggggtgtgggaggggagtggggggagcaggaggagaggagggagggacaactgggactggaatgtaatgtaaaaaataaattaataccccccaaaaagaaaccctgtctcaaaaaaacaaaaatccatgtctttgttgttttgttgtttgtcctgtctttactaaaactagagacaaccaggagtcaaacaaatgaaatttcaacgctaagaaattgcgttaataatgtatgtgcaatatattatgaaaataactccccttttacaatggaaagtagtcttatagaggtagtcataactggacaaactgtagccctcctggtatttaagcccttccagagaagcaatactgtgtaagggcttgcggagtactgagcagtccaaacgacactaagttgtttgcggatgttgtgttgcctgaggctgcgtggaggatccggaaacatggaaaattgagactatgaagcagtcgctcgcccagatttaatcgcaactagaccttctcggctctgttggctcaacagtgcgcaggtgcacctagcccttggttttacgcgtgcgcattatttaattgtgaagctacaggcggaagatggagagcgagtgtttcttctcccctcagaacgttcagtgctagaattcagagactgtagccgtgtctgtttttggagaacgatcgagtgtctcattataatccccctttccttttgggcctctctggggagctggctgccagtacctaatatggcgagagcccgtgcgtccccgcgctggttcccggcgctcggctccgcggggcggccccacgaaagggcgggagtttcggggggcggggcctggccgcccgtcagagcgccgcccctggcctggcctgccgggtactgggtagcttctgcggttgctgaggagcgcttcgggattcccgggaaccgaaggtggtgaggtgggtctggggcaggcgggaggtgccgagggtaacggtctgaggccagcacgggcgcccgcggggatctcgcccgggcagcggcttccctttccccggaggagccccgggcccggagaggagctgggacggtcctaggggtcccggctggcctgcctgagcctcctgctgcaccaccgcagctccggagaacttcacgccagggccaaccggctaagacgctgcgctccccgcagatctcacttcgtgctcccccgagctttgcagctccccgttaccctgcctgccgagcgctttgcacgtgatctgcccccttgaaagtcctgtcccagcccgctgctccatcctcagatttagtcaaagatcacttcttcaatatctttcctagaggcctgctccaggctcagctaatttcgattcttggtttttgcgatctttgcccaagtcagtgttcttcccctcgctcgtgttctgggcttgtttattagaagccatgtcttttttcaactgtatgtcccatgatgatagcagtaactaatgaagtttctgaatagtcgcaagatgacagctctgctaaatgcattatctgcaaaggcccctttagtccactctgcgatcgatgatgtgggttccatatgtaaacattttatacatgaagaaataagcacccataaatcaagttccacaatgagttagaatctgcctatgcatatgattgatggcttaactagattgtctttgagttgctgtttgtacattagcctgtaagatacagaggctactgttaacaattcacattttactaaaagggctttttttgaggggggcggcgggtaataggaattgaacccagagacttattcatgccagccagtgttataccactgaattaatcctgagccgtctttttgtttttaaattacatctacagtgttctgtctgcatgcatgtttacacaccagaagagggcaccagatctcattagagatgattgtgagccacgatgtggttgctgggattgaactcaggacctctggaagaacagtcagtgctcttaacctctgagccatctccccagacccctgagccctttttacttatttattttgagacaatgtctgaccaagttaccaaggctggatttgaacttggtgtcctcttgtcttggcctcacaagaagctgagatttcaggccttgtgtatccaggccaggccctagaaggtttatgaaggagaattaatgttaccaaatcgataatattcataacaaaaaaatctaggccagatccaggttgtgctcccagtacacctacaccccgtgttcttccaggacccttccaccttattttgttctttttacctagaaaacctcaggcctcagcattccccattaggaaatgctccgaggtgctgtgattttatagtttctgactttgacagctaatgcttgagcatagaatttggaatcatattagaatttggtttctactttgctgctaactagttgtgactcttaaaaaaaaataagtgcctgtggcagggcaatggtggggcacacctttaatcccaagcactcggaaggcagaggccatcagatctctgggagttcaaggccagcttggtctacaaagctacacagagaaaccctatctgaaaaaccaaaaccaaaaccaaacaaaacaaaacgggggggggggggggggggggggtgttaccatggtgtacatatggaggctagaagacaactttgtggagttggcacttgccttccgccttcatgtgggtcacactcagatcatcaggccacttctttacttgctgagccatgttcccatttcccctttcatttaaaaatttatttttaattttggggagggttgtgcatgaatgcaggtgtctgaggccttagacctggagttagaggcagtcgtcagctgcccagagtgggtgataaggactgaatttggatcctctgcaagagcaatataggctcttaaccaaagcaccacttcctcacacttagatattttgttttgtttctccatttgttttgtgttttgcccttgttgggttttgtttttgctttttgagacacagtctctttaggtagtcctggctgtcctagctgtcctagaacttacactgtagaccagactggcctcaaactcagccatccacctgcttctgcctcccaagcgttgggatttaagacataggccaggacccagctcacactaacattttttaaatattagttttccatgttcttttttttttcttctttaggattttatttgttttgattttatatgtatgagtcctttgcctacacatatatatgtgtgccatctgtgtgcctggtgccatcagaagtcagaagaggaactggagttgcagatggttgtgagtcactatgtgggtgctgagaaccgaacccagctcttctgaaagaacaagtgttcctaatcttggatccttgaatcttagttctcttgattgtaaaatgatggcactaatttttgttttgttttttgagacaaggtttctctgtgttcctggctgtcctggaactcattttgtagaccaggctggcttcagactcacagagatcctcctgcttctcctaagtgctgggattgaaggcatgagccaacactgcccaactgagacagtaatcctaataccgctaaggttttttgtgtttgtatttttttgataaggaaggttgcaactgattgttgtaagaggtccacagccacaccaccctgaatgtgcctgatctcatctggtcattgtaagattaaacactgtacacattgtgcatggtgttacttttgctttaggaatgactgtggaactctgccaatattttgtaaagctattggtgatcataagggtcatgtaaggcaggcactgaattcagatgctctcggccagcctgagctactagagcaagacaccgtctcaaacaaacaaaaccagtgcttttgtgctggtggtatttacattttggtaagttgttacacatgataattagaggcagatagacatggttagtagaaatgccagtgcatatgtctaggagtggtggtactttacatggtacaacttcccaaaaaggtgacagttgatcagaaacctggttagaacaaatcatgtggataacaaatgagaacacagctcctgccgtgttctaagcacacgtgaggatggctggccatgtggctggaggagtggcaaaggggagatgaaatagaattgattcatttggctaagatgggtcaattaggactctatgcacgattataaagatttcctttaactgtagttggctgttatctagggtgtggtggctttgtgttttgagacagggtctctatatgtatctcacgctgccctcaaacttaactgcatagtccatggaagactaacttgtagcagttcttctgcctcagtctcacaagtgtcaggattttaggcatgtcccactatgcctggctatttatggtgtgtgtgtgtgtgtgtgtgtgtgtgtgtgtgtgtgtgtgtgtgtgtgtgtgtgcctgcagttctcaggtgaaggttaaaagacaacttttatgagacagttctctcctccactctgggttctgtggactgaactcaggccgtcaggatggcagcgagtacttttactccctgagccacctcatcagccctgtttggtgttttaaaaggatcctctaactgttgtagtcagggaaaaaaacaaaacagaatttagtggtgtcaccagcacctaggaagcttgggcagtgctccagttttgttgctgtgcaaggaatcctcccagggttagtattaaacagcagttgtttgttacctcagagtcactgtgggtcagaaatttagaactgattagccgctgcttctggcttaagaggctcaggcaaggttgacagtgatctgaagagttccacaagggctgggagatctacttccatgatgcctcaatcacaaggctgttggcagaagtcccaatgctttctcctgagcctcctcactagcacttgtgtgtcctcaggacagagcaggtatttctccagagagtaagtaagcaacaagccacagcaccttctgtggccttttctcagaaggcatttctacttaaacattttcttatgatttattttattagtatagatgtgttgcctgcatgtatgtgtgtgtcattacatgtataacctcaggggtcagaaaagggtgtcagagcccctggaactgtcacagatggttgtgagccaccgtctgggggctgagaactgaatgctggtcctctaagagcatcaagtgctcttagctgcttagccaactgtctggcgttagtcacatctagtttatactacactcaaagagaggaaatttggtttcacttttttatttttagaaaggatttcatgtaaccaggctaaccttgaactcactgactttaaacactggatccttttgccttgatctttgaatgcccggactgtagatctgtgcctccaccagcaacttaggctctctttaatttttggtgggggtgtggtggtggtgatgatagtagtgtggtgggttttttttttttttctggttttatgtatatggtgtgtgtgtgcaagtgtgtatccatgtttacttgggcagggccagagattgggtgtctctcttgatatctttccacgttatatgttgagtcagggttgagcacttgaacgcagaactcaacaatttggctagtggagatagtcgtctgtgttacttaggaaatgagtgtatagagagatttaaggctgagccttgggaccctcagtcttcagatgctggagaggcagaagaccttgagtcactgccaatagcacaaattctaattgttcttagtaataaaatctcctagtcagatattggggggagaagcaaagcagcctggctctagctcttacctctgcctcagatcacatcctcagactgcttcagactgccactgcttggaatctctctcttgtctcctcctgccttatattcctctctctgcccagccatatcactcctgtctccacctccttgtggtgggattaaagacatgtgatcccagcactttgtgtgagttctgtttctcttttagaccggatcattttcatgtagcccagggtggccttgagctaacagagatctgtctgcctctgtctcccaagtgctgggattaaaagtgtgtaccaccactgcctggcctctatagcgaacgagtgtggctgatcttcagacaagctttatttgttagatcataaacaaaatatcaccacaactgccttgttggttagtaggtagcctggttattcaaaagagccagaaaggcatatttgtgtatgtattcatgaatgttggcatctgtttttgaattcttaaaatttttatggtacagtgacagacacctgtaattacaacacttgggaggtagaggcaggagactcgggaattttctttttttttcttttttttttttctgagacagggtttctctatagctttggaggctgtcctggaactcactttgtagaccaggctcgcctcgaacacacagagatccacctgcctctgcctcctgactgctgggattaaaggcatgtaccaccatcgccctgcctgagactcaggaatttttagctacgtacaagtcccaggctagcctggactgtatgaaaccttctctgaaaaacagaaagaacctatggcacacgcctttatctcagcactcaggaggcacaggcaggctgatctctgtgagttcaaggccagcctggtctacagaatgagtgccaggataggctccaaagctacacaaagaaaccctgtttcgaaaaaccaaaaaagaaagaaagagagaaaggaaggaaggaaggaaggaaggaaggaagaaaggaagtcgaacctgcaggccactaaatttataacctctggactaaggttgagatttgccaggagtaggtgtgtattgctgacaatttactaatgactaaaatgaattacacggctcttgccttgaggcacacagtggtagcaaagacagacagatgctcatggtaaaatgtaatgtggatgacagtacgatggtggtgtacctctttaatcccaacacttgggaggcagagactggtggtgaaagacccctggaggctcaggcccccaggatctctgcccaggacctcagtgaccccaatcaccaggcggagtaaaaaacttgatgcaaacagcaagaggttttattgcagttgtttaaccccattttagctcaggcctttcatccattaaccatgatggatggctaggaaagatgccgagaagccatgcagtagagatcttatagggcagcataaggggagtgtctaggggtacatacaagttcaggattggtgtgcctccaggcttgcagggcttgcccttgtgttgattggtcaactggttgttatggcccataggccctcccagggcggttgctatgctctgtgcatcattgctgtgcacttgtctataaagcacacccagagccataaagcatagcaccaccagctaacttctgattggttccttgccacaaggcaggcatctgaccaagtgaccaaggcaaggtcaggcaacctagtgctaggctgttatggctgccaaaatgggcagctggtcccttcagtgactctcaaaagttcaaggccaccctggtctacaaagtgagttccaggaaagccaagactactcagagaaaccctgtctccaaaaaaaaaaaaaaaaaaaaaaaagataatgtagacattagaatacatgttttctttaatataggtgaatgtatatgtgagcaagagactgcgagtgtgtgcatgtgcacacatatagccataaaaatttgactccaatgcttcatctgggtgggcaggataggagatagactaagccatgctatagatcgcatcttggcaaatgaaaaggatttggagttctagaaacttccacattgtatttaattgttgtgtcattgcttctgccaagatcagggcatcttccagattcattccacaggttgctgagtcacgagtcagacacaggggtgtggtggcatagcaggggttcttagtttaatgctaagtgccagacagagaggtgcaacagcatagcaagggttccagttttaatgcagagtcccaaaggcaaacctagaagcaggggtcctgtgactacgctcatcatagctccttggagaggttagagtccatcctagtcttttaaaagttctgaagagattgattggagagatggctcattggtttagagcacttgctgttcttgcaaaggatacaggcctagttcctagcacccacgtggtagctcacaactgtctataactccagttcctgggtattccatgttctttttggcctcttcaggcatcaagcactcacatgatacatatacatgcattctggcaaaacactcatatacataaatatatatatttaaaaagaaagttctagtcagtctgtggtggcgcatgcctttaatccctacactcaggagggaagcaaaggctggcggatctctgtgagttcaaggccagcctggtctacagagcgagttccaggacagcctccaaatttacacagcaaaaccctgtctcaaacaaacaaacaaaaaagttctgaggagtcctgtaataaaggaacctatttacttcattcatccagatccatttccgcttaaacatttgctgagtaaatttgaggaacctggccttctcaatcttgttatgttttggtccctagctcaagaggaggtctacgacacatagatcagtgatcagacaccctgctgcaagcagcctgtagctgcacaggaactgtggatttgttctttgatgctcccatggagacaggaagccctggattgaacatgaagcccaagtcgttacagctagtgctggaggaacaggtcctggcactgcagcaccagatggcggagaaccaggctgcctcttggcagaagctgaagaattcccaagaggcccagaagaggcaagcaacccttgtgaggaagctgcaggccaaggtgaggcaaatgcccctctgggaagggaaaaaagaacccctcacccagagttgagtgctagagtgggataaggactggatgagtgagagaccatgtaggggagtggaccaaacatcctggtgaggatggcccagatagttcaactctcaaccatagcctctcctttgatggtcacaaactgctccacaaagtatggattatgttccttccaaatatgacattcacaatagttaaattagttgtctaggtttgttctcttagtctagagtagtggttctcaaccttcctaaatcctcgaccgtttaatacagttgttcatgttgtggtgaccccaactgtaaaattattttcgatgctacttcataactataattttgctactgttatgaatcataatgtaaatatgtgtgttttctgatggtcttaggagacctctgtgaaagagttgttccactctgccaaggggtcacgacccacagaatgagaactgctggtttagaactaagcccaaacccaatacacaaagcatatattgtgtgtgtgaaagtgtgtgtgtgtgtgtgtgtgtgtgtgtgtgtgtgtgtgtgtgtgtgtgtattcaggtgcacataaactgtgagagtgcatatggaaaccagaggtcaatattgagtatcttctatcactctccatcctactttttaagtttattttgtatattgtgtgcctatgtctatgtaagtatatgttgtatgtcagtgccctgaaaggcagctggagttataggcagttatgagccgttctgggtgctgggaactgattttgggtactctgaaagaacagcaaacttttaagcaccgatctatgtcttcagcctctaccacactaattttgggacagggtctctcactgaactggaaatcatagattcagtaggctcgccagccagggagctccaggatctgctgccctgcctctgtagcactgggatggtggcttttcacactgggatctgaacttgggtcttgatgcttgcacagtaaacattttactctttttgtattttgtttgtttgtttgtttttgtttttgttttttcaagacagggtttctctgtgtagctttggaggctgtcctggaactagctcttgtagaccaggctggtctcaaactcacaaagatctgcctgcctctgcctctgctgggattaaaggcatgtgccaccaccaacaggcacattttactgaccaagccatctttaccagccccttggaaatactgataaaaaaacaaaacaaaaaccttgtgtaagtctgagagtacaagcaagcgtgcacctgacacatgttgaggtcaggggacaaccttaggtgagctagccaatgagtttagggttgctcctgtctctgcctcccgtcttgcctcaggagtgccgaactatagacacacactaccacatctggctgtacttgagctctggggatctgaactcaggtcctcatgcttgcacagcaagtgctttcctcctgagccatctccccagaaagtgtttccaaacacccggctagaaactcttaagatgctgtggccttaagaagatgactttgccatcaccacctgcttcccatgttcacagcagattcgcccaagatcccttaaagcctttggcttgtgttgtttatatgggctatagttgtgctcagggtctgctctctttgctttaggttttacagtaccggagctggtgccaagagctggagaagcggctagaagccactggagtaagtgagattgagttccggacttcctctcagcccttaaaatatactggcttggctttatatgctgccaaggaaggctggggttatacaggatgtttggtaggagttcctctgtctccagctccaaagagctaccaataaggtcttctagagacccttggcctgagagattccttcccatggtttcccatttataaatgcaggttctggggacttagcatagtggaatgggcatatggcattggagggaaaattcatttttcatccagcaggtgtcagtgtttatgcatcaggaagatgtgcaccttgcatgcctgtaagcatgcctgtaagcatgcctgcagtagaaggatgtattaattgcctgggtagggttggctgtgaaagacccttttgtcattcctcaattcctcctcattcccctaaggaaagttctcagaagaaggaaagaaccagaatgtattgagcaccttctgtgcagacccgggcacccctaagcattggtactgttatgtcagtcaagtgcaaactctgagacaaatgacaaccaccttggtttgtggtctggtgatgatgcgtgacttcctgaggtcccaaattagtgtgatagggccctagtcaaagatgcagcttgcaatcctcaggcggggtgccatttcccccaaatgccatcttttaggggaggtgattggttcacttttgaagaaaggagtgtcctgggtttgcttttatgacagtgactgagaaaagaagcaaattgctctcaagaggaagaataacagagaaagtaggctgctgttgaagaaggcgtcagggattgtcctgggtgatgtttttgtgtggtatgataaggcctgtctgtctcataagggactgatccctcagcgttgggaaggtgtagaagaaccaaacctggaacagctgctggtccgattggaggaggagcagcagaggtgatggaccccaactttcctgatctgagtgatggtgcagagggtggagaggctgagggaaaacttctgttctgcgagtgggaaagtgctgggatggtggttcatgtgggtagcataaggcaggcgggaagcaaaaaaagggggagggatcttcttggaaccttgtgtcctgagggcaaacaagattccagtcctctcattcctgatgatggaaagttccgctcactcttactcccaagaggtccaaggtgggaccagacctttatcctgcccttgttcttcctgatgcccagtgcaggtgtgagagtctagtggaggtgaacaccgagcttcgcctgcacatggagaaagctgatgtggtgaataaagcccttcgggaagatgtggaaaaattgacagtggactggagtcgggcccgggacgaattaatcaggaaggagagccagtggcggctggagcaggaggtaagaagaacaagggtggaatgtgcactctgctgctgtctgagcagtgctggacctaggtggaaactgctcagtccttgttccagcctctgattagccctgcccaagatacagctgtgccctgtttcagctttcttcctacttctgcctcgtctaggctttgctgacaggtagtgtcatgctcaactcctgcaaaagtgactatctcaggtttcaaatggatctgaaaatttactgtttgccttcttctgaaggtctgcatagctagatgctaagaaggtagctgctggattaaatagaaaacatagttataggccctgggaaatttttcagtcacaactacagacagtaaatatttcttgaacctttgctgggtgctgggtctggctgatttgcatgtattagatcacctaattctcctgtctgccgtaataactcccatttgccaggcagccactgcctgcttttctgatctagccaaatggaaggctacttttcacccagggccctttgacctcttgaacctcactgccaactttttattaagcccctcaatatgacctgagtataggcacccatccataagctatctcctcaaagaccttcttctcttcaccctcacccagtagccatgaggcatccaggactcttgtgttgctgcaaggtcccctgcccttgggtgtgacttgggtttctgaacacagttcttcaagggctatttgaaaggtgaacatgaccgtctgctcaatctgtggcgtgaggtggtgaccttccgacgtcatttcctgaaaatgaagtcagctactgacaggtcagtatggggatgagacgagaggtttgtcctgctgatctggacttaagactgcaggctctgggaagaggcactggggacagtgggcatgggctaggagggagatttactagatagagattctctcagacctgaaagcctatgcctgagctctctaccttggttccttggagtcttcaatcttccttcttgtgctcagagatctgacagagctaaaggctgagcacgccaagctttcagggtccttgctgacctgttgtctgcgcttgaccgtgagagcacagtctcgtgaatccagtggatctgggagaacagagaatgagcccgcccagctgctgctgctggtagctaagacccaggcgctggagaaggaagcccacgaaaagagccaggaattaatacagctgaagagtcaaggggatctggaaaaggctgagctgcaggaccggtgaggtgacatatggtcccaggaggactgtagtgagggaaagctgactcccctagagaattgtgggtgggcagaaaaagatgtcaggaacaccctcaccctgggaggggaaggggtccacttaggaacccagtgtgtctgttggggcctgttactgtccctctggctaccttgcaactcagtctctctcctgatagtttgtgttgctagctgttctgtcaacagcagtctcctctcagccatactctcccacacttctgtctaaatgtatgccagccatagcctggagtgcctccctccttccctctgccttgccctttaagggagagttcacatgtcacctcttctgagacttgtctcactttaatatcttgtagtcccatgagttttttgatctgcttattacagcactaatctcactgtatctctttaattactttgtttccttgtatccctcccttcttttggtggtgatggtgggggtgggttagaagtgtttttgctgtgctggggtttgaactcagggccttgcatatgctagtcaaacattctatcattgagctataccccaccttggctttcttaacttttggattataataaaatgggatttttaaaataatgagaggggaagacatgagctgagtgccactgactaccaaggcaaacttggagtctttgatctgtgtgtcatggctagggttcttccctacctgttggtagtatacataaattggggactgtttcgttttctttctgcttttagaaacattaagaacaaatcttaccttagtaggtttatatctttagtgtttcatgccttatttctcatataatagataattattgtttgttgaataatacaatatttcaataaaagacaatagtgatccccagaggtggtttctaataaaattattgaggcttaaaattttcttttagccaggtgtggtagtcatcacttttgttgttttttttgttttcaaggcagggtttctctgggtagccttggctgtcctggaactcactctgagaccaggctggccttgaactcacagatctgcctgtctttgtctcctgaattctgggattaaaggcatgtgccaccgctggctgtctggtagttgtcacttttaatcccagctctttggagttataagaaggcttgaactctatgagttcaaggtcagcctggtctatacagcaaattctaggtcagacagggctatgtagtgagagcctgcttcaaaagtaaataaataaatgagtaaatgaataaataaataaataaattattctttggtaacattgatttaagaaatacttgttggccaagtgtcatggctcatgcccatgatcctattactcaggagactgaggcaggaagatttctagttcaaggtcatcttggactacatagagaatttcaggcaagactgggctatatagtcagatgctgtcaccaaaaaaacaaaagaagaaagaaagccatgtgtgtaacactagtcacaaagccctgaggtgtgacagctgttggtgattttgcttgtcatcattagctgtattgtttcccaagtcatctgtcctttttccctatcagagtcaaaaccttgggctggagggaccttgggactgtcccctgtggtggcaattctgatgttcttattggcttcagggtgcttaacttcacaatcaagcgaggcctggaagggcctgggccagggctttccttcagctctcaggcccacagcccgcgttccagtcttgagatgtggtaaatccctgcatgtgtctgagtggcttttggctttccctaccagatcaagaatatagagtcacatgttattcagggagtgcaaaggactgggcatccccaagggattctgtgggctgcagtgggggtgtccgtgtgggggctgaggtgtgctattgtgtggcgccgtcaccatccttgggctgtccaggggacagtgatgtgctttctttcttagagtgacagagctctctgcgttgctgacccagtctcagaagcaaaatgaagattatgaaaagatggtaaaggctctaagagaaacaatggagacgctggtatgtgatcctctgtgttgcaaaggtgctcagagtgggttgacaagttccttgttctttggggacaagtagtgaatgatgctatttaaatggtccttgaggaaatccttcaaagctgaaaagtaaactttggctgaatctgaaaatttcttaactcattcatctgttcagtaaaataataactgtccactctcctgactatattcccagagaaattacaatgacatttatatatatatatatatatgtcattgtaattcatatatatatatgaaatgtgtccttgtctgagagagaagacttgtcatagtgaatttggggcctgtgtgagccacatgagacactaaggaaagctaaaggggtgggaatgagcatggtatcagagaagggttctgtggagggattaaaaaccaatttacatgggggacaactgaggagcatggcagtgtttagcctggagcagaaagaatgtgaggaagataggcttgctgcctttacatctctgacagtggagttgatggggaaagccagttgaccagtttaatgttttccagggtagagccatcaccagcagtagaagctacagataaagtagtaggttttgacttgagctagagctgtcacttgaacagtgtgtgtcttacgaaagagtgtcttatgaaagagaaagattgttctcaccatcttaaacacctgtcaggggtgtcacagaagtgattttccaagataggatgccaaaatccctggctgattccatgtttcctttcttcttaacacatttttctggtcatagacttttggcagctccagaaccctatccacatgttctcctagtctcatctgtgttggagtccactaggaagcaaacttgtttgtgcccctttaattcctttctgtcaggaatttgccaatgcagacatccacagggctcaagtaaattaaaacgagtcacattgaattgcaaagaattctggttttccagggccatcagtgttcactgctgatagaacaaagaactttaatctaggcagtcatttaggtttttaaccattttattcttagccttttattcctatattacattgttttcagactccttgggagagtatggttgacagaataaacagaatatgtctttgaatgacttggggacaagagtttggctcttaggttctattctgtccttttactaggagacaaaccatgcagagttaatggaacatgaggtgtctctcagtaggaatgctcaagaggaaatgttgtctctacagcatgtgatcaaggatatagctcaggtgctggtaagcctcttgtcctgtaactggacagtgtcccctcttcttcatatcctcttagtggccttgatttctagactgaggtttgggctaagggtcatgtaaggataagttctctcggtgaacttaaagaggtgtaggttagcattcatgtcctagcactgtgtagtggatgggtctatcctgttgcttgttatggttctcagcataggctgaattctgtctttgtcattacaaaagcattttcttccccttccccctcacttactgccccagagagaattctagccttggtgctaactattcttagatgaccaaacatgaagaattgaagggaccggtcaatttttgctcttaggtttccatccttggccctagcccagagataggacttgtaaaaggaaccttggttcctctgttctgtggtgcaagtctctccatgacactcggttgcatttcaggcctcagtggaagaagaggacactgtgacccacagctcagaccatgagagctcattacagttggactgtagtggcttctccccatttgatccccagaacccagacaaggctcttactctggtgcgttcagtgttgactcggagacagcaggctgtgcaggtgagaagccccagagctgcttagaggcggactcctgcctaccagttcccaaataaccgacttggaggcttaatattataaatgcttgggcaatacctcaggcttgttactagctaattctcacatttaaattaagccatgtttcctatctatctacgtctgccacatggcttggcaccttttctcagtagagcatgcccaccttgcttctctctgtctctgctggccactcctgactctgccctgattcccagcattctcagttttgctctcccacctaacctttcttgcccagctatgggccagtcagctcctttattaaaccaatcacaacaacatattcacacagtgtaaaggaacattccacagctgctcctcagccatagacacatatctctagtctggagtaaccctttcagctggctagtcataatgtatccagttgcacattagcttctctatttgcccagtggtgctgtggctcacaggtgtttatattctccacaccaactgcatgtatgtgcaacactaagcagagtcctgggagagtgtaaaagttccccaactccaagtgacacttactgtcccctatgccaccatgtttgaaggtgttggattccaggactccagggccacagagcccagtgatccctgattctttgacgtctccattggccacatttctgttcttgccgactgttgttacacctgtccccatccccttgccttggagtcatccctttgtttgtggctccttgttcttcatcctgttctatggatctcctcccacaggacctcaggcagcagctttcaggctgccaggaggctatgagcttcttgcagcagcagcaccgtcagtgggaggaggagggtgaagccctgagagaaaggctacacaagctcactggggagcgggatgctctggcagggcagactgtggaccttcagggagaggtggactctctcagcaagtgagtggacaggctgcttgtccctccctttcatgcttggtttttgtttttgtttctgttttaaaggaaagcaaagccttcaaaactttattttactccatgttttgttttacttaatggttttgcagctacattctcagttctccagtgtctgcttctagtcctcatttagccacttaccgtcactgtcctgtttttgattggttcttcctgttgtcactggactcatggatgcttaaggctgctttggttttctatttcctgtgggaaaaccctttggtctttaggatcaaataataaatggttttctgcttgaaaaaagttatgtatatatatttgaaaagaaacaagcttctctcatgttttgccctacaaggtctttttccactagggtcttttgtccccaggtctgtcccccagacctctgtctgtatttcagggagcgagagctgctgcagaaggccaggggagagctgcaggagcagctggaggtgctggagcaggaagcatggcgactccgaagagtgaacatggagctgcagctgcagggggactctgctcagggggagaagcaggagcagcaggaggagctgcacatggccgtccgtgagagggagcttctgtaagtgtgaccaacctctgtcaccagggtccacaccttccccaccccactcctctctcttaggaagtggagtgtgtaaaacctgcgtgtgcttcacactgcttactgcgtcttcctttgcagaaagatgagttagaaagtccatctagacattgtcgagtttctatagagatgtgggactgtgagggctacaaaaaactgatcatgatctcaaggagcttgaaacctaataagtaatgtgacaagcaaacagctgtgacgtgaagcttgaagaaatacagcctcactagagttcaagcttggtggtttggaagcgtaggagcaatagttactattcagaaccaggggcgactttatggagatggggccttgacatgtaggaaaagggaccaagggacagaatagcaaagaaaaggaattgggagtttgtggcatgttctgagttagctgtctgagaaaagacaaaaccactgggaaatgataggaaattcactggtcaggaagggaaatccagggtcagtgccctctgggaaatgataggaaattcactgatcaagaagggaaatccagggtcagtgcccccagctaatctgtgaggtccactggtaatgctacagaaaggaactgtagagcaggacgaaggtttggtgcaggtttttgctttgccaccagaatggattagtctcttggcaaaagggagatgacatttgaagagttattggcaagatgtggcagtacttcataaaatgctagcatagggctgtcaagatggtgcaatgtgagttcaatccaccaactcccatggattgtcctctgatctccatgtgagtattgtagttccctccccacatacaaataaatgtaattatttgtttgtttgtttgagacagggtctcactctgtagtcccagctcaccatgaacccacaatgccagcagagccctggtgacagctcttcacttggtatagtcccctcctctgtgccttattccttgcacctagtaaacagtagaagcttaaggaatctgccaagaggtagggccatgctgcatgtcctgcactgagggcatagcagaagatccacacagatacatatgtgtttaaaatttaatctatctgactcaacaatatagttagataagtcaaaagccaaagctgtttaaaaagataccagggtatattggctcacatctgcaatcccaatacttgggagacagaggcaagaagattgctgtgagttcaaagccagcttagactgcagagcaagaccctgtcacaataaacaacagaaaacccatctatttaaaaaggtgcacacagggaagtctccctcatcttttctcgatctgtcctattttccttccgttggtaaccatttcagttaattttgtatttatttttccagtccacttcatggaaatattctgctttctctcactttttggcatgaaaggcagtacactaacatgctgttatgctctttccttttttcacttgctctgtcttagagagctttccttactagtttttagaaatgaattccacattttttttttaaatagaaaaaaaattagattcttgtctcctgttgggatgtggtcactcccaaacacttcccttagctccccctccttcccttcttagtcaggagatgctggtgagcctggaagctaaacagtcagaatcactaagtgagctgatgactcttcgagaagccctggagtccagtcgcctggaaggggagctactgaggcaagagcaagtggaggtgacggcagcctgggccagggtatgtgggccttctcactcggaaagctgtgttcccaggaaaggggctcgatggctcactcttcacccttccgacttcaagcctttctcttcaatcactagtctgcttctgggtcctttccttcccaacatgcgctctacactgaaattcagttcactctctaaagtataaatctggctgttagtctctcaaagttgccccatagaggtggctcagcagttaagagtgtgtactgctcttgcagaggccccaggttcacttcccagcacccacatcagatggccaacaacagcctgtaactctgggagaatctgacgtcctcttctgaacttcatgggcacagcactcatatttgtacatttattcgagaaaagagacgcagacacatatatacacaggatttaaaaataaaagcctttagaagaaaattcagtggcttctcaactctggtaccatattcaacaccctttgccatctgcctcagacactctctgggctggccttcccaggcccaccacacgccaggtgtcctttgctctccccacaaaggtcagctgcgttctcaggttgtcttccttcttgactctaatacattgtatactcttttctttcaccttgactcccaagaaccatctccctctcagtattcattgttccaagcattttctcctctcccaaactaaactgatgccttctttgagttttcagttgtgtttacagtttctatactgttgtgacaattgtagtttgcacatctttctgtgtttctattctgtgagcacatttctcatgaatgaatgaacgagtgagtgagtgaatgaatgaatgaatgaatgaatgatagaaaaccttagaatggaagggaagagatggaatgatattttataaataaaagcaggttttgggagtgtttactgatccatgaaaactcaaagcaggaaacactaacttttgtttttaggcagaacagtccattgcagagttgtcagcttccgagaacagcttgaaggcagaggtagccgatcttagagctgcagctgtcaagcttggggccttaaacgaggctttggctttagataaagttgggctgaaccagcagcttctccaggtgagcaaagatttgatttccaggaggggctggaccttatctgaggattagcccttggcagacaaagctgatgccttaatggggtggggagtccttagaggattaggcaaaggcaggtgagctccagaatgtggctgaaatgagcaagagggacctctacagtgcagaggagaacaaaggattagactcaagcactatagatagccctcctctgtacctgccgctgagcctttgataggacaagggaagggtccatgtccctggaagcaagacttaagtgtttaatcctattgggtgtggcagatctgctgactagcccacgtgccctcaaaatcacctgttggttaaaaatttaacctgtcatttttagtaggaaaaacttcttgcttcccgctttcctgagacccagaaatgtcattagtctgggtgtcctgtttgttttttttttttttttttttttgagacagtgtttcatgctacctaggctgtcctgatcctccatcacttcccaagtgcttgcaccaccactagtgttattctgagctctttggaagcaagattttgcctttttatctctatcccagcatcaggcccatctggtgcccagaatataaacaccagatcaaatggacgggtctcttctcttcaaagcactgttttgttcagctgtagggagggttccagtcacagcacttcagcagcataggggaactatacccatttacctttgatgcctgcattcccttccctttgtggccagtagttggagcaggagaaccagtctgtgtgcagcagagcggaggcggccgagcatttgagaagtgctttgcaggtggacctggcagaggcagagaggcacagggaagccctgtgggagaagaatactcagctgcagactcagctgcagaaggcagaggagtcaggagctgagctgcaggcagaactaaagagcatccgagaagaaaaggaagaacttaaagagaaactaagtgaggtgagaagagaatttgctgtggtcacttgcagtgtaatgcatgcttacggtaagcagaaaggactcagagagtgactcagtgtgagtgaggtatctgcccactgttttaaggaatttccccgactccctattcctacatgatttcccctgaattcttagctagcactgcataattagttcaaacatctacagttctctcatgccataattatttgtttgatatccttgaaggccagcctatgttgtttacttatttattttggtcttttgagacagtgtctaactctgtcaccctggctggcctggaatttcttatgtagaccaggctggcctcaaacttgcagtgttccacctgttctgcctcctgagattattagctaccatgtccagctaaggctgtgtatatctgtctttctgtttgtttgtttgagacagggtgtatttgtggatttttattgttttgtttaactcacaacatgaggaggtatggccatttatagtgggaaaagcatggcagcagatgtctatgtggtagccaggatttgtggcagctgcttgcttgcctcttagccaccagaaggcagagaaaggggaatgaagtgttctgctgggctttctcctgttgtccttttaattgaatctgagactccagcgcatgtgatagtaccattcatattcaagtggttttccctcctccattaacatcctcacagacatatccagaagtgtgtctcctaagtgattctaaatcaccaagctgacaataaagcttaatcttggcaatcttgcttttccctaccaaacctctcattgccttaatacttgaacataatccattcttagagtcccttctcaagtgttagtcactttctcatgtgtatatgggtcctgttgtccctaggacagtatctcactcataggagagcattctttctggcctggggcctcctgattgatgaaggaaataaataaatgcctattatttctgagtcatttcagtgctcatggtgctgagtctagactctctgaagaccccttggtcctgacacgttgttagcagccctgggcatctgcctcactctgtatctcatcagtttcttttcctcaggcacatcaccagcaagaagcagccacagctcagctagagcagctgcatcaggacactgagcgacagcaagaaacacttgccagagcagtccaagagaaggagaccctagtacgggagagggcgactctcgaggttcgcctgcaggctgtggagcgggaccgacaggacctcactgaacaagttctggggctcaggtagggtccacacttaactctaccaagcacccagagctttgcaaggctaagctgagctccctgtcctgagtgcatgatctgtaaatgaattgtagacaagtaattaattgcttgatggattagaatacttcctgattcccaaatctcaggtcagccaaggaacaactggagagcaatctctttgagacccaacagcaaaattctgtgatagaggtcactaaggggcagctggagatccaggttcaaactattactcaagccaaggaagtaattcaaggtgagagcccaccagggtgggcacgctgcattccatggcaatgttcacagccaagagggcaatgggaagctttcctcatccagacttgggtcctctgagatggaagctgctcatgaggggggtgggccgggaaaatattattaggtaaagggagtggcgtggagcagaggctcagagtggatcttgcctgacatcttaggggaagtgaagtgcctgaaactggaactggatgctgagaggagccgggctgagcaggagcgggatgcagtagccaggcagctagcccaagctgaacaagaggggcaggcagctctggagcagcagaaggtggcccatgaggaggagttgaacaggctccaagagaaatgggtaggtagcggctgcccattggggaataggagaggcgacacggcatccctttagtgaatctgccacctgccgctgttggtccagttattactgcttagaaaaatgaaatttgatcaccagggtataaaatccagtttaataatcctcaatcataggtgtggactttgggagcccattccacatagagggatactccctgagccaagacacacggatgggcctaggccctatctcaaaggatatgatagactctgatgacaccctatgaaaagcctcactatccagggggagcaaaaaggatatgtgatatgtagggttttagttgggggggtggtaggggaggacgggagggagaagggaactgggattgtcatttaaaacaatcttgtttctaattcaaataaaaaaaaaatctgcaaaaaaaaaaataaccaaaaaataataataatcctcaatcccagaatgcatgtctctgtttctacttcagcctctgttttctgagataggatacctccttgtggcctagtgggcctcagagttgaacagcttctagctattaaataagttaccatatgaaaaaatacaaagactagttcttggcatagtatgagctcttcatttgtaagctctctctctctctctctctctctctctctctctctctctgtgtgtgtgtgtgtgtgtgtgtgtgtttcttgtttgtttgcttggtataaataaagaattaagtgtggttcctggaagcagccatggcagagcacaactataatcccagcatttagaaccagaaagcctgtgggttcaaggctacctgttttacaaagggatccacacaaagagatgtcaagaactgatggcgtacacctttaatcccagactggggaggcagaggcaggcaaatctctgtgagttcagtgacaacctgctctacttagtgagttccagtccaggattacctagtgagaccctctctaaaaatttatttaaattaaaaaaaaaaaaaagtttggggctggagagatggctcagagattaagagcactgactgctcttccagaggtcctgagttcaattcccagcaatcactgggtggctcacaaccatccattatgagatctggtaccctcttctgatgtgcagatacacatggaagcagattgttgtatacataataaataaataaaatctttaaaaaaaaagttgtaagagagcagtctaccttttaatcatcagggagattgtaaagctaggcaatcagaagatgggattacctgagtgtgtggagaggaaaagagaagggaccaccatgatccaggtgtggccatggcagtcactccttccagggaaactgaagccattagctcatcaatcagaaagtttgaaatagtttttactttgggcttgtcagtgggcattacccctgactcttagagggatgcagccactgtcatctcagcacataattctaaaagtgggcaaacttttggctactatcttgccaacaaacccaccttaaaacaataaataatcaaggggctagagagattagtgcttaagagagtacagctctcaagaaggccctggcgggctcctagcacccacttcaggtgattcacagttgcctgtaaagccagctttagaggtcctgaagtctttctctgacctctgtgcacatatatacatacatacatacatacatacatacatacatacatacatacatacgtggcatacatatacataaataaaaataaatatttaaaaacaaccaataatcaaaagccatacatgatacttagtgtgtgcctataatccagaacccaggaggcaggtgctattctttcagaggacccatgcttggttccctgcacccatgttaggtagttcatgactgtagtacgataagtaaaagacccagagacagatatggagttcaaacttcaagctgaagaacagaaaactaaaagagccagccactagctctcactccctcagactgaaaggtgatcctggctccaccaaacctctggctagctgcctctcctcagcgtagctggagaatcctgagacttaatgtcttcctatcctcaatgtggctggagaatgaatgccagctctgagaccctggccctggtgtgtgataccaggtgctgagatcacctttgtgtgagctatttctctttaggactggatcaatttcgaggagctcagtgtgaccttgaactaacagatctgtctacctctacctcccaagtggtgggattaaaggtgtgtaccaccaccacccgatcactatggcttgtggctgactgctgtctgaatcctcaggcaagctttaataaatcataaataatatgtcaccacacttcccctttttcatctgcaactccagctgcagggtgtcctgtatgcccttctgaatcccaccagttcctgcaagatgaagccagttaaaaattccaaggaggaggaaggggctcctaaggcccaacttctagttaaggaattattagcacttgatggcttttgaaaatcggttctccttccagtataggttcaggggatgggactcaggtcctcaagctgatgcagcaagtgaaccaaagtattctggttatagtctaaccagaagtgatggattattcctgttttgacatcacagaattagctctcttgtggccatacattcatatggagcaaacagcttaattttgttttaggtttctttaaacaattgtcaccattaatctttcacatgtgtttacagttggctttttgaacctgaatgtaaggtttgtcatttacaatgatcctgtggttagcatctgtactactgttctttgtttgtttgtttgttttatcgacagggtctctctgtgtaatagctccgcctgtcctggaactcgctctgtagaccaggtttgcctctaactcacaaaaatccatcttttctgcctcccaagcactgggattaaaggtgtgcgccaccactgcctggcctaaacatcatttttaaaaaaataaatctcacttgactcttaagttttaatgagacagataaggcagggattgttgagcctttcatcagaaatgattgccaggctgagagcagtgcctaaggcacagtgaggcagtggagagattcgcactccaaacaactctctggtctcctctgctcatgcactggttctaacagtatggtttcctccacatggtcaggagaaagagcgctccttgcttcagcaggagctggagaaggccctggagaccctggaaagggagagaacggagctggaagtaaggctgagagagcaacagacagaaactgaagccctccgtgcacagagggaagaggagcgaacccatgctgacagcaccctgtaccaagtaagtggacccttgtgacctttgattccccctggcttaccacttttcattctaacagcaaggctcaagtggggcttccagaagagtgtgtagctaccactttgctgcttgcaggtgggctaatacgcagttagctgcagcaggcagtatgtcatacttcctgagggagggccaacatttaccacatcctgtcagcttgcaaaccagtggcaatctttgcacttcctggttctaagttaatggtcttagacgttcctttgccctcagccttcatcctatttgttggaagaacttggagcaaatgtgcttatggcctcccgggttagcatgataacccagagccgtgaagcccttgcccttcctgcctttccacagatgcaactagaaacagagaaggagagagtctccctcctggaaaccctgctgcagactcagaaggagttggcagatgctacacagcagttggaaaggctgaggaaggacatgaagattcagaagttacaggaacaggtatgcaaggcgctcctgggcctggtcctcctgcctcctcccaaacgccagagttacaggcatggaccacaacacccagttttatgtattgttaaccatcaaacctcaaggcttcatgaatgctggcaggaggctgttcttaattactttatttatttgttctgtgtgtatatgtacatgcatgtgcacgtggcatgaaacgcatatggaattcaactcgtgggagttggttctttccttccactgtgtaggaccctggaattgacagcaagcacctttacccactgaggatagtttttgaaggacaaataggatttcactgtcatagggccctgtagcagacagaatgaggcttgggaaattcaaggacaaaaagaggtgcatggctctggtgtgataaacttgggggtggtacaggagagggggagaggatgggggtggtacagagagagaggagaggatggggtggtacaggagagagaggagaggatgggggggggccaggagaggggggggagggggggggggggggagggggagagggggggggatggggtggtacagagagaggggagaggatgggggggggcagggggggggggggggggggggggggggagggggagggggggggggggggggtaggggggggggggggggggtggggggtggtacaggagagaggggagaggatgagggtggtacagagagagaggagaggatggggggggaccgggggggggggagggggggggggggggggggggggggagggggagggggggggggggggggtaggggggggggggggggggtggggggtggtacaggagagaggggagaggatgagggtggtacagagagagaggagaggatggggggggaccgggggggggggagggggggggggggggggggggggggagggggagggggggggggggggggtaggggggggggggggggggtggggggtggtacaggagagaggggagaggatgagggtggtacagagagagaggagaggatggggtggtacaggagagaggggagaggatggggtgatacaggagagaggggagaggatgggggtggtacaggagagaggggagaggatggggggggtacaggagagagaggggggtggtacagagaggggagaggatggggtggtacaggagagagaggagaggatggggtgatacaggagagagaggagaggatgggggtggtactggagagagaggagaggatgaaaggagacctttttagctatagtaggagcttgggttttgttttgaggccaatgaaaaatggtgaatgatattttaagagtaggagaacatggggggctggagagatgcctcagtatttaagagcactcctctttcagaggacctgggttcaatttctggcacccataaggcagctcacaattgtctgtaattccaattccaggggacctgacaccatggcaaagcaccaatgcatataaaataaaattaataaattaaaaaaagagtaggagaacacattatttttttaaaaggcttatttatttttaataaataaatgttatgtgtgagttttttgcctacttgtatgtatatataccatatgtgtgcctggtacttgcagaggccagaagaggatgtcagatctcctagaactgaagttacaaacatgtggatactgggaattgaatctgggtattctgcaagagcaaagtgctcttaaccactgaccatgtctctagcccctgtgatatatcattttatgtatttaaatacttattcttttattatcattatctttttgtggttctggggctccaacctggaaccttgtaacattttaggcaaatgttcagctactaaattataatgccagcctagaatatctttttgaggcagggtctctgttatgtggcttccacctgtctttgcctccctagcactggcattaaaggcatgtgctgccatgcctggccaggatatcttttaatacagtacttgaccaagtgaaagtatgtacatttatgtatgcaatcaagtgaaaataggggtatgttggggaggctgtgggcctgtctagaagtttgactgagcccatgcaatcgtgtggaagaaggaatagggtataaggatagaggggggaaacaatatgcattcttagtccctgcctcaggtctgtcaactcagtagaatcaaacagcacttatacagcacaggtttcaggagctagcccctatggaagctttttgcactcactgatcctttctccggtaggagaccactgacatgctgcagacccagcttcagggagcacagcaggagctgaaggaggcaacccagcagcacagcgaggagcatgctgccttccggaaggacagagaagacctacagaagcaggtccatctttcctacctgcctcacagccctgctcaccacagccaaaccttcccactccctttgtagacaagagtcccaggtcctgctgcttgagcttgggaggacagggctacagaaataagtgcagagttgttgaagggtgttcagagctgatcatgtgcctcaacgagttctgggattgtattattagccatcgttacccagattctaccaacagccactgaaaatacatactgtgaatatacaggccttttcttattctctaaataacaaccgttttacatagtgtttactttgtattaggtactgtttacattgtattcaatatgagaaatgtataggagaatgtgaataggttgtggtcaaaagctatataatttaatgccagcacttaagatttaagaggttgaggcaggccaggtgttggtggcaaacgcctttaatcccagtacttggaggcagaggcaggtggatctctgagtttgaggccagcctgcctggtctacagagcaagtaccaggacaggctccaaagctacatagagaaactctaacccttggagaaaaaaaagagagagacagagattgagtttgaagtcaatcctagctgcatagtgggattctgtctttaaaacaagaacaggctaggaaggtggctcagttaataaagtacctgccatagtgcattaaggtctgagttcagattcccagcccccacatggaaagctgggtgaggctggagaggcagagacaggcgggtcctggagctcaccatcagctggtcttcctgaaagtaagtagtatcaggtttaagaagacagatcctgctttaaaaaaaaaaaaaaaaggtggagaatgatagaggaagccacacattaacctctgacctacacacacacacacacacacacacacacacacacacacacacacacgcaccatgtgctgggattaaaggcatgcactaccaccacccaccttctcaaccaagatttttatttatggctgcacttatgtagcatttctaagactttggaaacgaacaagcttaagagtttgggggaagggaatgataagaatgtggttgaagccaggtattggtggtgcacacctttgatccaagcactcagagtcatgcaaatctctcagtctgaggacagcccggtctacagagcaagttccaggacatccagactataaaaccctgtctgaaagaaagaaagaaagaaagaaagaaagaaagaaagaaagaaagaaagaaggaaggaaggagaaaggaaggaaggaagaacacacacgcatgttcatttagatagctcagaacaactacaaattgtctactgacctccacaacatgtcatggtatgtgattgagtgtgtacatacacaagtaaatgtaaaaaagaaaacaaaatagtgtagggactagtgaaacctccagaactgtggagatgggccactgactaatatggcttacctgagcctaaacatctagacttcttcttctgggctttgtcatctcagcctcttgctcttaaccttccaggtagaggacttgaagtctcagctggtaacccaggatgactcccacaggctggtgaaacaagagattcaagagaagatgaaggaggttcaggaatatagccggattcagaaggaactcgagaaagagaaagccaggtaagctagacagccagaggggtggcttgccttatgtgtcgtagtcacagtggcactgactattctgtgcaaggttatctcaccatgtctcactctggagtacacgtgtagtagccatctggagtggacatgatctcagcttcagatcttatatttagtaaatatttagagaaaagaccatttatgcaccattgtcttatgacaatgtagtccctacctcaatagaatttatagtctgtgggatttttttttttttttttttttttactcccagacagggtttctgtgtagctttggagtctgtcctggaactcactctgtagaccaggcttgccttgaactcagagatctgcctgcctctgccaagtgctgggatcaaaggtttgcgccaccactgcttgttggaaatttttaatcgaacaattttttaaacaaatggaaagagacaaggtgcagagagagagagagagaaagagaaagagagagagagagagagagagagagaaactgctttagaaaggtataaggaaaatctttcccaggaagttacatttaaactgaatgctaagccagacatggaccctcagtcccagcactcaggaggcagctctctgagtctggccaggtctacaaagtgagttccaggacagccagggctacacagagaaatcctatctttaaaaacaacaacaaaaagataaaataaaaataaactgaatactggagctgtcagatggttcagctggtaaggacgcttgctgcgatgcctgcccgacctgtgttcaatcttcagaagcctcatgatggaaggagaggatccatgcctgaaggttgtcctttgacctccactcgtccctctatacacacagtaaataaataaacagatggaatgttgaaagacaatggagccacccttgtaatcaaagagagttctgttcagtaagagaagaagtcttgaggcaaatgagagctttccctctttggtgatgccagagtgtggaaagctagtattagctaaagtccacagcaggagcttgtaggttacattcaacaggaaactgtaaggatttcaagtaagggaatcagcataatcagatttctggcctgttagaagggatagtgatggcctgaaacatggagtgacatgagcccattcagaatgggagacagcatacgctcagtgacctagggacctgaaaaggaatggatcttttcaatagtgacaactgagtcctaaagacaagtcaggaggctggaacaggtgtccaaatgagagttagcaagactgtgtgtgccatggtaagtaggagggaagggaagaagagaggaacttaagatacattacggcttaagacaattatatatagttatagattggatgtgggtaggatgaagggggaattaaaatggttgtggcttccatgctttgacactgtagatgaaagagccattcacagagccatgggacagagtgagagatgattgggtggagaattggggacacagggatgggaagcttggatataatgaatttgaaatatgtgcatatatatgtgggatttatcagagaagaataaattggagtgaaatgagtcctcatgtatgaagttcctaggagcccttaggtgttcaataaacagtagttcttactgaccctctggtcaccattatggtttctgttttaacaagcagtgctatgattagaacaatccggtgaagtacactctcaccccctgagagaatgacctctctctccaacctttgtttttagcctggcactgtcgctggtggaaaaagaaggcagactcctcattttacaagaagctgactctgttcgacagcaggagctgaattccctgcgccaggacatacaggaggcccaggaaggacagagagagctcagtgtacaggtgctgcactatgcctgagccctactttctggagaggatgctcttagaggggctgggtgaattttttttttttcctaagaacaagataggctgggacctcagcatccctgccagtaggggaaaagcagggctgggcaccaggggtttaggaacctgacacacagatgagctctgtcccatgtggggagcctgacatcctgaacagagtgttcatgcataatcacttgcagatgtacttcatctggttggcaaaatgcagcaggggaacttggagggtaaacaccagcaagaggccttccgtactccatttgttcattgactcggacctgagcctggaggagagacaaagttgaaaaggagagggaaggggctcacacctacctactagttttcatacagtctgaccagctccatgtcaaggtttcagggcagagttctaatctcagcagggctgacatatctgtctgactgggaacagggccaggtgtgttagtgtagcctgggcccttgtgtgtggtgttgatcacccccagttgtcagaactactcatttcagggcccttcctacctgctgcagagctgagcccactggacttctccccatctggggtcctgatggagcttgctcagagagtctacttcctcccggcaggtggaactactgaggcaggaggtgaaggaaaaggaggctgactttgtagcccgggaagcacagctgctcgaggagctggaggcctcacggatcacagagcagcagctgcgagcttctttgtggacccaggaggccaagacaacccaactgcagctgcagctgcgcagcactgagagccagctggaggtactggctgcagaacagcagccagagaaccaggcccaggcccagctggctagcctttactctgttctgcagcaggccttggggtctgcatgtgaaagccggcctgagctgaggggtgggggcgactctgctccctccctgtggggccctgagccaggtgaggaagccacatgagagctaagtcttgtgggccaaagctggggagagggaaaggaatggagttcctgctgtaaaatagcatccaggttaaggccaccgctgattccaggtagcttgaaccccagtctgtttggtagcaggcaaagccacctaacttctcggaacttgatttttcttgattataaaatgttaaaagtcctatcttagaatttgtctaagaatataaaaagaggtaggccaaatggaggtgcctgcctgtaaccctagcactaagttccaccagcctgagctacatagtcagttgtttggggttgaggttgggataggtggattaagagtatagtaaattccagccagcctggactacttaaatcctgtcttaaaaaaaaaaaaaaaaaatgaggctgggcagaggcaggtagtctctgtgagttcgaggccagcctcgtctacagagtgagttccaggatagtcatggctattacacagagaaacctgtctgggaagggaaaaaaatacaattttttttatagcttgcacttttgagcatagctgccaacagccagcattttctaatgcagcagttctcactgtggggttgagatccttttgggggttgaatgaccctttcacaggggtcacatatcagatagcctgcatatcagatacatcacaattcataacagtagctaaattacagttatgaagtagcaacaaaataattgtatgtttggggtcaccacagcatgaggaactgtgttatgggttcgcagcattgagaagggtgagaaccactgccctaatggaaagtataggaataaaccttctagaagggattctttggagagagggggggccagcgggagggccaaggccctgtctggggagggacagctaaagctgctgcttattgtggcagccaggtaagaagtttcccttttcttcagatcagaatggagctaggagaccctttaagagagggtccctcctgaccgcactgtcagccgaggctgtagcattggctctccagaagcttcatcaagacctgtggaaggctcagcaggcccgggtatgtcctctgccctcctccttccttttctggagttcccctgagatcctcaaacagacttgtaaatggagggagatgggtcaaaggttactcatcccgatctctgcccctatcatcccacctgtatcagtgactgtcctgcaaacataactgagcctttggatttcctgggccttgctttcacttcctcagctgtcccactctactccaaaccccagttgctgggtggggcctagaggagccctgagaactgtaaacatgggttttctcttatatcatttcttctcatccaagaatttcttcttggtaccaaatcccctgagaaaaggcaggtaagctggggcgtattgaaatttgaggtcaccacttaacaaaaatattctagacttaagactgaacctacttcacctcactgtgcacttgctagtcagtactgagagctgccagtgcacctgtgcaccagccactcagagctggtgatacagaaatataaagacacagcctgccttcaagaagctctgcatagtggagctgacagaaggaccagttcagacagacagctacctgctgggactggaagaaagtgtcaggggaactgtgaaggagcctcttgggcgagaaggggtgtggcctgggataggatactgagcagttatttcaaaagaaataatccaggtgtagcggcacatgcctgtagtcccagcactcaggaggctgaggcaggaggattgagaacttgagactagcccgagtgatatattgagaccttgtctacccccccaaaaaaaataaaaataaaagatttgggcagataaggtgtggggcctcaaatgtctgtaatcccagcacttgagaggtagaggcaggatgatagtcaggagttcaagacaagcctagattttgtagtcactttaagagcaacctgggcttcatgagactgccagaaataacaacaaaaacctaagtccaaggggtgccccttaggttcaccctcccttctgcataagagtttaaagcagtgattctcaacctgtgggtcgcaagccctttgggtgctgagcgaccctttcacaggggttgaatacccgatagcctgcatatcaggtttttacattacagtttataacagtagcaaaattacaatagcaacaaaaataattttatggttggggtcaccacacttcaaggaacttatttaagggtcacatcgttaggaaggtttgagaactggcttagagagtggggtcatgatggcagagactgcagagtatggatagtctctgagctcctgaaagtgtgagctcagccccgcccttcctctcccaggatgatctgagggaccagatccagaagctgaaacagcacctgactgatacagaggcccagaagagccaggtccactcagacctgcaggacctgcaaagacagctctcacagagccaggaaggtgagatgctcaggggaccaggctgaaaggaggcaagagcaggtggtggctggaatggggagactagctcaggcacctgggaggggcgagcctcttcaactcttgttccactgtgcttggcttttgtgggccaccctggaagaaggatttagaaggaacggacttgggaaatcgatagacgctgcctcctgggctgctgatagtctcttcggggagttgtttttgttttttcacttttaaaattgcacttattttgtgtggggggggggatgccatggcacacatggaggtcagaagcaatttgtggaaatcagttctcttctaccacataggttccccaggatttaactcaagtagtcaggtgtggtagtgggagctttttcccttctgagccagctcaccagcccatgcagggaaaaaaaaaattttttttttcaagcacaaaatcctggtgaccctgggccagaactatcagaacataaaactgtatttcttttgtcgtttatccctgttacttatttttaccattttccactatcacctcaaaattagcctttgaggacaaaagggttgtaaacatactcttgagaaaggccagaaggggactcaggaagagcaagcacactgccatgtccctctgctgagggtttggagggtggggaccacttggaaaggaaaagaggctcaagactgttcccttctgaagttctattgcagaaggaaagaggtgagccttttaggcatttgagaccttgtctaccccccaaaaaaaataaaaataaaagatttgggcagataaagtgtggggcctcaaatgtctgtaatcccagcacttgagaggtagaggcaggatgataatcaggagttcaagacaagcctagattttgtagtcactttaagagcaacctgggctgaggttccgtcttcagactttgagggcctctaggaaccacctacaaactcatagaattggggctagaacgggccactgcatcagctggctctcatgtctggagagcgatctgagaacccctgggtgatgggttctcagatgaagtgtagggtgattagcaggctgtgctgtgccaggactctcagcagacacagatgcaaggctggaagcagctgctggcagaaaagtgatggcacaggacactgggtgtcattttctcctccttggccttgttcccctttgattctgatccctgtcctccatctgcttctgtaccctgtgttcccccacctgcagccatgcacctgactccaacatctctgttcttttcaaagagaaatccaagtgggaagggaaacagaactccctggagtctgagctgagggacttgcatgagactgtggcatccttacagagtcgcctacggcaggcagagctgcagaaaatggaagctcaggtaaagtgctggtctggggaagagtgccttgggaattgtgtttagagttcaagcacctaacccttatcttaaccctaaccctaaaccttgaccctttcctaaccctagccctgaccctttccctaaccataaccctaaccctaacccctgactctgacctttttcctaaccctaaccctaacccgtgttctgcctctcagaaacaccttggcctgtctgtgctcatgcctggcttccttcagcaagtctcaaagttccctgactcttcccaccttcccattattaaggtcatagtgaacctttatttaattactttttctggattaagattagacagttattccctgatgtgcaagatcagggtctagaatgcctctttgcattaggctatctcccctggacacagaagagctctggaaggtggtagggacacttggatagggtcagcttaagtggggcacttcttcagtccttgttaacgactggtcactgatgttgcctcaaaataagaagccagtgttagaatgatagtatcaagaaaataatcttgtccaggcagtagtggcacacacctttaatcccagcaggcaggctgacctgagttcaaggtcagcctggtctacagaattccaggacggccatgactacactgaaaaaccctgtcttgaaagaccaaaataaaaaggaataatcgtgtcttaaagccttttgcctcttgtttccagaatgagcaagagttgcttcaggcatccaaggagaagctgacagcccaggttgaacgtctgcaagcatttgttgcagaagcccatgctcaggcaagtgcggcttctgtcctggaagaagatctgcgaacagctcgctcagcactgaaactgaaaaacgaggaggtagagagcgagcgggagagagcccaggctttgcaagagcagagtgagctaaaggtagcccaggggaaagctttgcaggagaatctagccctgctggcccagaccctgtctaatagagagcgggaggtggagacgttgcagactgagatccaggaactggagaagcagcgggaaatgcagaaggcagctctggagctgctctccttggacctgaagcagcggagccaagaggtagacctgcagcaagaacagattcaggagctagagaagtgcaggtcggtcttagagcacctgcccatggccgtccaggagcgggagcagcagctgagtgtacagcaggaccagatccgagaactggagaaagatcgggagacccagaggagtgtcctggagcatcagctcctggaactggagaagaaggctcaagtgattgagtcccagaggggacagattcaggatctgaaaaaacagctggtgacactggaatgcctggccctggaactggaggaaagccatcacaaagtggagggccagcagcaggtgattgcggagctggagagccagagggaaatgcagagggtggctctaactcaccttacattggacctggaagaaaggagccaggacctacaggcacaaagcagtcagctccatgagctggaaagccacggcacccatctggccagagagctgcaggaaagagaccaggaggtgaaggctcagcgccagcagattgaggagctgcagaagcagaaagagcagctgactcaggacctggagaggaaaggccaggagctgatgctgcagaaggagaggattcaggttctggaagaccagaggacgctacagaccaagatcttagaggaggacctggaacagatcaagcactccttgagagaacgtggccaggagatggcttctcagcggcagctgatgctcgagcgggcagacaatgggcagagccctggtaaagcccagcgcggaagcctggaacacttgaagctgatcctgcgtgagaaggagaaagaggtagaatgccagcatgagcgcatccaggagcttgaggagcacgtgggccaggtggaacagcagctccaaggcctgcacaggaagatgggtgagactagcctgctcctgacccaccgagaacaggaggtagcaaccctacagcggcacctccaggaagccaaggaccaaggggagctgaaagagcaggcacttcagggtcagctggaggaggcccagagagctctggcccagagggaccaagaactggaggcccttcagcaagaacagcagcagaccctggcccaggaggaaagcatgaagcaaaagacaggcgctctgcaggccgctctggagcaggcccaggtgaccctgaaggagcgccagggggagctggaagagcaccgggagcgggcacaaaggctccaggaagagctggtgctggagggaagacaggttcgggccctggaggaggtgttggcagacctaaggtctgagattcgggaacacgagaaggctgtgctggcccttcaacagcagtgtgcagaacaggcacaggagcatgaggcagaagccaggaccctgcaggacagctggctgcgggcccaggccacactctcagaacaagaacaagagctagcagctctacgagcagaaaatcagtattcccgccatcaggaggaggctgcatggggccaagcagaggctctgcaggaggccctcagcaaagcccaggctgccctgcaggacaaagagcagagtctccttgagcaggctgaattgagctgcactctggaggccagcactaccgccttacaagcttccctggacaactgccagtcacgtgccaggcagctagaagaggccctgaagattcgagaaggtgagatccaggcccaggggctccaacaccaggaggttacgcagcagcttcagcaggccctttcccagaaggaagaaaagttgaggcagcaggaggagcagaggcagctgctggaaaaggctctgacccaaagcagtcaagaaaatgggatccaagagaaacaaagtctggagcaagagagaaaagaggacacagggggccttgtggcgagcctaagggagctacaacggactctagcccaaaaagaagaagagattttgatgctgagggaggcccagcaaaggcagagtctagaggcctcttccccaagccacagagccttcccagcagagaagccagctccacaattgtgccaggagttggaacgactgcagaatgccctgaggcagacagaggccagggagatcgagtggagggagaaggctcaggacttggcacggtccctggcccagagcaaggccagcaataacagtctgcaggagatcgctatgctcctacaagcctctgtcctagagcgggaatcggaacaacaaaggctacaggtgagtcactaggaagggcaggggatagagttcattaactgagctcaagggctgcttgcctgtggtacctcagagagtgagaaagtggaggtggtgagcccccccatacctcagagctagcggaacagatgagcaaccataaacagtggggtccgtgtctgataaaggaagttcagtgtgctccaagcacacggggacaccaaagcttcccaaggatggtaccaaatggcttcctggtaaaactggtgtttaaggttaggttggaagagactagtagggaattaaccagacaccatgcaggtgggactttcttgtggaaaggcagaggaaacacgaggaaggaacatatgggggacctgtgaaagagggccaagtcacgtggaacgtagagacacgaggccagcagaagctatggcatccagggctcctaaggactaggtcactcgtgggaagtgggtagaaaatttaggacaatttcagaataactgctcaggatgcgtgtggatcgacagcagacttgaggagacaaaaggggactctggaagtccagggaaaggtggagacttggggggggcgggcaaatgtgaataaagaaaggacaaaggcagcaccaggaatctgcccactgagatgaagaaaagcagggtgaggaggtgaacttggtcggaagtggaatgaggcacctgggggacacacaggggacattcctgtaggggaaggagtgtggcgcttgaaagtcagtggttgattatagacggttgttctcaacctgtggatcaaacgaccccccagacgcacaactcctggggcctcctcactttctgggaactcacaaagctctgccctggtaaaaaggtggtgtgtgaagaaggaatcacactcacaaatttgggggttgggttcctagatttgaaataggttctgtaatttactggctgttgtctatttcacttttcaagactgcatttcttttttttcttttcttttctttttttttttttttgttgtttttttgtttgtttttcaagacaagatatctctgtatagctctgactgtcctggaacttgctctgtagaccaggctgactggcctgcctctgcctcctgagtgctgggattagaggtgcaccacacctgaatacgtgggaatgatggtttcaatgaggctgtgtgtagcaagtgctttttaacatttatctatttgagccacatgtgtagaggtcagatgatagcttgcaagagttggatctctcctttcgctatgtgggtccccaggattgaactaagatcatcaggctaagtggcaagcatcttactggccatggaacttatcatcatatagcctatcctgtggcctagcagaaggggggcacatctctgggcatgaggatacttcctaggcttgctctcaggttactgagtgttctttagataacataacaaagatcagaggcagctctttgtggtggtcatgcttttgttgtttttggggtttttttgtttgtttgtttgttttttgagacagggtttctctgtgtaacagtcctggctgtcctggaactcactctgtggaccaggctggccttgaactcacagagatccgcctgccatctgtgtgtagagtgcctatgcaagccagaagaggatgttggattccctggagctggacagttagaggcaactgtgagccatgccatgtgggtgctgagaaccaaatttgggtcctctggaaaaacaacaagttctctttaccacttagcattttacatattttatatatttttgcatgccaggttccattgttctcactttttcactaccctcaaagaaggaactgatattatgtccattttgtagttgaaaaatggcagtttgagacttgagcttatccaaagtcagacatctggttgaaatggttagctctgacatctgagtagggctcaggattagaccatttggctcttcctttccctgtgagcctgtcacacgtgtgcgcgcgcgtgcacacacacacaccacaacacacccctcacaccaaacatcacacactctcacatccggctccattcttgagcacgattatgaagagtagaggatgagatagttttggacatgagtttggcgtagtgtgatttttgtccctcgctctgtaccctaggaggagttggtgcttagcagacaggctctggaggagcagcagtcacatggctcacattcaaccagcagagcagaccgggggcccaaagctggacaagatgtacatcctggaaaggtgagctgggcctggtggcataggaggagccctgccaacagtgtgttccctccttggggaatgggtctctgaacccaagctcacaaattggtccctttgccctctgtctcttctccctgtctgtctggatgcccatatgagtaccatgggtcttccctgcaggtagttgtggctgagcccagtcctggggtggaggagaaggagcagtggacacaaaggcttgaacgtctgcagcaagcagttgcacagctggaatttgaccggagcaagctgcaacaccacaatgcgcagctgcggattaccttagagctggtcagtaacttctgcagtccccgtcctgtgcctgtttctgaaacagtttattaaattacaccatgctttctctgtggatgcctactcatcatgctggggagcatagtagttgacatggcaggaacagctcaggaacaacccacaaagctatcctctgctcccagggcctgagagctggcctgccttctctgtaccaggagcacttctctgtaccctactgtatgccctccccagccctctacactcacccctgcacacgtgctggctccagatcaagacgtgatttctcacttgcatattggcaggtagagcgagaacggaggaagctgaagagggattccatgcgtgcttcccgagcagggtcactggagatgaaagaagctatggcttcgtcccccgcacagcaggttaccctgtttttctcacctgcctctttcttcctgccactatagaagctcaaccctctgtagtgcactgttgtatgtagagacagccactctatttaatctagagagccccttctgggttgattctgcccgttgtctgtccttgccttaggaggaggtccagcatcagtgagtaagcacagccagggatagtgggttcagatcactcccaggccagtgcctcacattgccctctcatccagagcctctggcatccagggctatgtcgtgcttaccagctcttgacacgcccaggagtttgagcacagctttgtatctaagagccccttagttctgagtttacaaagttagggttctgatgtgtcctggcacagagccccattctcagggaaaagtttgctcttttaaaccgtcaccgcctaaggtaaactgtgcccatcagcatggcaggaggaacttctagtcctgaacatctccagcttcaccccacttcctttaatgaacgtttcccaggggcagatactatctttcttccccttcggcccaatgctgccacaaaccagatcccttatgttaaataaaagagttcctcacagccgggcgttggtggtgcctttaatcccagcactcgggaggcagaggcaggcggatctctgtgaattcaaggccagtctggtctccagagtgagtgccagaataggctccaaagctatacagagaaaccctgtctcggaaaaaacaaaaaacaagttcctcacagaagatgctgcttgtggtgctgctgtgaggccctcttgggccttccctctgcctggagccatgccccacagtgcttcagtctgagttcaggtactcctggccctcatgatgagctagacccctgcgagggggataaggagttcagcaccgccttttccacagatagacctcctggaggcctcgccagcctaggagcacaggtgggggtaggatgctgtggaaactccattctaacaggagccatatctgttttcctcaggatgggagagcagctcagaggggttcctcggatagcatgcgtgtggttgaacttcagagagaggtatgttctggaaggatccatttcctattccccttttctctcactgtactcaggcaacaggttcagtgtctgcatgtccagcaggagaggggaagcagctttggcactcagagaactttgatctccataggagacaaaacggtgctccagtcccaactccaccttcagtgtggcaggaagtctggggagaggagactcagagggtctagggcagaatggggcaagcagcactggctggcctggccctcccttgtaggcagggctgtggacaagcacactaggcagaggcactcagacatggccaggcaagctgccatgctcaggaaactactttaatgcctcctgcctcctgtgctacctaaagagtccagaagcctcttcttttctcctccttcctgctccctacacctgtcttcctgtcccacctaggagtaatgagaagtatagatttgacttctgaacctctctcagaatcagtagttattgttggcaggctgactccagctggacttgagctatgctttgtagtctgttaaatttctacgaagccccctgacacagagtctgaggcaagagaagccttgggactttcgttttcccgtgtcctagtttcattgataaacacccagacaacagcaatggacaggaaaggggttattttagctcacaattccaggtaccagtccatcgtagcagggaaggcaaggctgccagaacttaaagcagctagtcacagcacagtcagcagctgggagagaatgcatgcatgcctggtacttagcttactggagtccaggactcaaagccaaggaatggaaccaccggcacaaacaagctgggtcttcccacattgtttatgtagacaaagcagtccctcacagacatgcacaggccaacctgatgtacctagtcccaggtactagattgtgttgacagttaagcccgctgtctttcctgtggagccagtgttgagaatcactggatttggagtccatgggacccttatcccaactccagtgcctgattctgagattcagatatgaagcagttgatcccagggtggagccacaagccacgagagcacagagcagaagggccaggacagcctcagagccttcagctgctctccttcttggttttcctgtccaccaggtagcgctgctgcgagcccagttggcattggagcgaaagcagaggcaagactacattgcacgatccgtgcagaccagccgcgagctagcaggcctgcatcacagcctgtctcactccctcctcaccgtggcccaggcccccgaggccactgttcttgaggctgagacccgaaagctggatgagtccctgagtcagagtctggcatccccagagccagttctgctacatcccagtctggacactgctcaaactacccccaggtagcagccatagccagggcagaacataggccagtaaggtggtgcacattggacaattgcagaggggtcacagctccctccctgcaacaactacaggtttgccaaaggcaagatttaactctgttacccaactaggaggcccgggtcagctgatagtcccaggaagaaaatgggaaggctcacatgggaatgaggcaaatcacatttgcttgctaacctcctgttacccaagaagtgccttgccctgactatggggcatctgttgtctttctgcctgttgaagcaagcacagtctacactgagcctgggccctgttggcaccagcagcacagcacgtgggtcctctgtcctggacaggagcatcctcagagcatgaagtgcagggaatgtccactgccttcttggcttcagtgtatccctccccttccccgtcaacaataaatgccaggccttcgccttcgtcctcggctgctgtctccacttctgcagacaggcagaagcaggacaccaagtgaatcgaggaagatgctgcgtggtgtgctgtctaactggggaggttacagaggaaaatcctggtccagcttcaactgtgactggtaagagccatgtaacaagtctgacaagatgcttggcacttgctgccaagcctgacaatatgagttctgtcccccgtcccacaagatggaagaataaatagccctctgacctccacacatgttcgatagaacctgcccctacatatacatatgcatgtaaacaaaaaaagaaccaagtaacacattaccgatttagagacgtgtatgagcagaagtcctgtggagattccaaggagcgaggcatcaccccctgacccctgagggatggagttgttgagagttctgctaaacacgtggtgggaacgagtctatctgaggcaaagggtggaccaaggttagaggctggattacagcaggcctctagctcctacccagacagtaagcatccactgtgtttctttacctaaaccaagctctatgacttttggctaaagccacagtcttgattggagaagtccatgtggcttctttccccataacacatggttgtctgaatatcctcccatgtcctttcctgggtgcatctcctggaaatgactctggcctctaagtcccaccatgtatcaagcgagtcagcacagaaagggcctggtggatatagactagagctcacaggcctaaggccattgttggtgacttcctcaaagcctaaaaggagtagtgccctgcatgcttcctctctctcccttcctcccgctgttccttccctctcccctctcctctccctcccctacccccccccttgaagtgttggggatagaactgaagacgtcagggttctgggtatgagttctaccccaagccatgtcactgccctacaccaacttcttgttcccagatagagaggcttgagcctgcagtgcatgtgccctcgtgctttgtatttttgacagttaagtcattcacatgtgtgtgcctgtccacacacacacacacacacacacacacacacacacactgtatgtattggtattccaatccaatttcatcttttagtatgtgcatatttttctagttccctatactgaagaatcagtcccctctgaaaacagtgaaactaacttgagtttgatcatgctacttagtgtaaatacagtgagccaatgccttttactggggttacttatgggcaaggagtattaacagaagtagaaataacccaaagacagctgtgtcaccaaaagcccaccccacatgggtgacactcacaaatgctgaacactttagctcactgtataacttgcaggcagctccacgggctggagactcttcctagcagttcaattgatctctgcttccttccaggcagctaggcttgtctgggagtggctctcagtaggcctcactgcttacatatacttatggagtgaagggtctagtgaatctgctcagtttttgggacttcctgaagcttttgagttgggaagcttccctgcaggatggaattttcgcctctccttagaaccccctgtgtcttcctccaaagtgaaaggttttgtcttgtaggaaaatgctacataacactgagcaaggcagtgcacacttgtaatgccagtcctcagaaggcatttcgagaacatcatgagttcaagatcagcctgggctacactgtaaaattctgctcaaggcaggtggatctctgagttcgaggccagcctagtctatagaactagttccaggatagccagaggccagagctataggggtcggggatggaggtgtcagaaagacaggcaggcattgcccctgggatctgacccttcctccccaggtattatgtttacagataagagaaccagaccaagattttattcagttccagactgatctcataccattttcttttgatcttcacccatgaatgtcttcacagttatgtggctgttatgatcctaaaactctgcagcattcatgcctcatctgcctgtcacttgtaaatggcagccttgtctggccatcccagctgacaagcgtcttccgtttgtgcttctctagtccatgcagacaggtcctgggggctctggtctgattatcgtaatgggaccatatactctgctgttctggtccaaatccagaaagggtggcctagcatgagagggatgtgcatgtcagcaggctggatcctgtcctttagcccttgttccctcttccatcatctagtgacaggctgtttctagaactgggagagaataatagagcttcccttctctagggtcgacagactgaacacagtgcaataaacactctcatagacttaccttgaacctcaaaaagaccatcaactagctaatctctgttatgccccgggaaggggattccagacagaagaaaggccctgtgaaaaggcaaaaggcaactagagcactagggaactgcgcaggggctggagaggtagcttggctaagagtactcactgctcttgcagaggacctgggtttggttctcctcagcacccacatggcagctcagaaccatccagaactccatttccaaggaaccaaactcccttttctgacctctgagggcactaggcatgaacatagtgcccacacatacgtgcagtcaaaatactcctatacacaaataattttttaagaaattgaagtgcagaatgggatacaagaaggcaagtgagtgtatgctcagagctttgccctccgcgccgaagacgtcagggaatgtggtgagtctgtgcgggccatgcagaccagactgtgaattccagcattgacactcagcctggttatccagctggttgcccgtgttatagttgtatctgggctagcctgcatctctccccacagcagctcagagatgcatgctccttacctcatcttaactagctcgtgcctctagggaaatcagactgtctcccaaaatctacagttgagaaagaattggagatggtgaaatgctagaaagctcctgagacctaagaaaatccctcagctgtccccagcgttcctcccatcttcttaaggggaacccccacacctccacactgagagtatttgggacatctccattaccttgtcactcggggcgccatctccacaagctccaggagccactgctgcctccaagagccctggtgactggcattcttgggacagattaagggtcctgtggtttggctcctcaaaactgcctcagatccgtgggtggtgtcctgactcatcctgggaacaatggcaaacattgacagaacctcgggataagcctggcccgggccctgctaccttctacttagtaccaacctgaaagccatgtagaattggttggtattgctgaggccagagttccccagcatggcacagggcacacagggaaagtcaaaatggtacaggaggggcctggggatcacttctgatagctccttccacgttttttcaagcttgcttactgagttcatgccctggtaacagcagaaagagaagtcggggttctggcaccagccatcagttcgggggtggggaccagggagaagcacacagcaaccaagagaagagggttaggataggaggtgagctgggcatggagaagacagtgagtggctcagggcccagtcctgaccactgaccagccaccagaggccttttgtcctcctcaaataccccatggtcttctcataatatgcttcaaaccagttccattctccagctgtgtggtggcaagtggagcagttcggggtccttgaaaggcagccactttccccagatctgaagcacagccagttacagtgctgtggtaccatgtatgtccattcctgctggggtgctgatccgtgtgtccaatccaggtagggagccatcagcaacaagacgagcccccaagagacccaacaggactccatatctggcccatgcaccaggtcatgtggcagacagcagactggggtctctacctgaaaggacatggggctgaggctatggacagtgccagcatcccttcatgctggtctccacagttccccggctttccttccagcttcaaccttcccttcctgtccattttctcacccccagggagcgttctcactggacctagagagaacataaattttatcctcagtgctccctgcagaaggaaatgacaggctgtcagggccactccagttgtatcacagtgcatcacagagtccacattgtgaccactgccctgtagcctgcctggggaaagtctgcagcctctctaatgctcaaaagtgagagccctcggctctcttccactaagatgcctgagatctctcaccagaacaagcctgaggctgaacttgtggttttccctagaagccaagccttgcaagacagtaaatgacccaccatcccctgctgctatggtttcagtgatcctccaaaatgtcttagatttatgtaatgacactctgtggcctctaatacatagatgcacatactatggtatcaaaaacttcccagccgggcggtggtggcgcacgcctttaatcccagcactcgggaggcagaggcaggcggatctctgagttcgagaccagcctggtctacaagagctagttccaggacagcctccaaagccacagagaaaccgtctcaaaaaaaaaaaaaaaaaaccctcttccctaacaatggaagcaacgggagcaaggttttttaaattgttttacacttatttattttgggggggggcattcattccacggagcacgtgtgtggtgatcacaggacaacctgcaagagtcgggtctccttccaccttgtgagttctgggaattgtcagaaattgtcagggttagtgacaagcacattacccactgagtcatctcactgccgccctgcagaacattttcatttgctcagaacagccagtactattgatgtaaaaggaaaaaagcaagaaaccccaacaactctgcattgaaaatcaatatgttaagcttgatttccatgtagttattcttcacactagaaattaaacaaggcccatatgtgtaaataattataaaacaaaacagtatacttcatcttctagacaagaatgccaaattcatttctctttgtgcaaaaccaattgtagcctagcatgttagtgtaacttttttttccccagcacttgggaagcagcagtaggaagatctctgtgagtttgagactagtttggtctacatatggagttccaggccagtgaggaccacaccctgtctcaaaaaaaattataattaaaagagctgactcagctgggcagtggtggcgcatgcctttgatccccacactcgggaggcagagacaggtggatctctgagttcaaggccagcctggtctacagagcgagttccaggataggttccaaagccacagagaaaccctgtctcaaaaaaccaaaaaataagaaaagaactggctcagtgggtaaaagcacctgccacacaagcccgaggacctgagcttgatccttcagtgaggagaccagatttatctcaaaccacggtctacatcctgctcacatccacctccaggagtatctagcagctggtggatgtcattctagttctgtggcttgtggatcagctgccaggccctgatagagctccttccacaatgtttatgtatgtgggtgtgttgcctgtatgtctgtctgtctgtctgtctgtctgtctgtatgtatgtatgatgtacctacaccatgtgcatgcagtactcatgagggccagaagagggtgttggattccctggaactggaggtactgaccattgagggccaccaagtggattctgggaattgatccccgggtcctctgaaaaaagcaaccatggtcttaactactgggtcaactctcaagctcctatacccatctttttaaatgcaagttctaaggatcaaactcgggtcaaatagttttgtgttcctttttttctgcagttagacctgagaatttacatttacagaactgattcctatataggtatttagtttggctccagtgttttgcctctaagcaaccccacgaactcatccttatgcctttactacctcgtacatcttttatttgttttgagatgagttctcacagcccaggctgaccttgaactgccttgaaattatgattctcctgcctgtaccttcttctaagtgctgggattacaataatcaccatgactggccttcctttcagtcttttgtttttgttttgttttaaaaaacaaggtctcccaggaactggagagatggctcagtggttaagagcactggctgctcttctagaggacctaggttcaatccccagcaccaacatggcagctcacactgtctaactctagttccatggaatctggcatcctcacatatatgcaggcaaaacataatgcacataaattagaaataaataaatttaaagcaaacaaggtctccctacatagcccaggttgacctcagccttgcatccctctgactcaatcactgcaaatggcctgggaaactaaaatacagaacaaaccctatacctaggatagtttggtgatcagctttgctcaaaggaggtgcagtgtgtagtgctcagggggaacaacagactcctaactgaccaaagtaccaagaataaatgactgttgaatacccagccataaatgagacagccatattacaccctccaaggctcagggaacattttggaagatggggttgagagaatataagatctacaggaagaagggagagcagtgtggaattgtgaattccaggcatgacaaggcatgacatggtagttgtacccttgatctcataagagctcagattaggggctggagagatggctcagtggttaagagcactggctgctcttccagaggaccggggttcaagtcccaggacccacacagccgctcataaccgctcgtaattctagtttcaggagacccacaacttcacatagacatacatgcaggtaaaacatgaatgcacatgaaataaaaataaattttttttaaaaagagctcagattatctgcacaaaatctccataacattgggccagtcaacaccagaggatttatatgcacagaatggttggtgagagaagcagagagatttttgtgagtggttgaccacatgaacacacaaagtcatgaaagtagaaggaaagtgaaagggattatgggtaactgtgtgtgtgtgtgtgtgtgtgtgtgtgtgtgtgtgttagaaatacattttatatgtatgaagatgtcataatgaaatccattattgtgggataatatatgctaataaaaaacatttaaaaattaggtgtggcagtacatgcctttaaccccagcttctgggagtcaaaagcaaacagatctctatgaattcaaggccagctagagccacatagtaagaccctgtctaaaataaaataatacaaaataaatgcttctgggtggtagtgcatgcctttaatcccagtactctagaggcagaggccggtggatctcgtagtttgaggccaacctgggttacagagttctaggacagcagggctatacagaaaaacctgtcttgagaaagaaaaaggaaaactttttaaaaatccttagatggaagggaaactattcaatactatgggtatgtaaccactcaacagcataaaatgggattcctaaagtgagatttatgacctgaagcaggaattctaaatcaaaacctttaagctcagggctggagaaagagctcagtgtggtttctgctctttcagaggcccctggtttagttcccagcacacacatcaggtgactcacaactgcccataagtctaattctaggggatctaatgccctctgctatcatccagtacacataaactcatgcagatacacatacccataaaaataaataaataaataaaccaggcagtggtggtgcaagacgttaatcctagcactagggaggcagaggcaggaggatctctgtgagttcaaggccagccttgtctaaagggtgagttccaggacagcctgaactgttacacagaaaatccctgtctcaaaaaaaactgcatacatacatacatacatacatacatacatacatacatcttcaaaacaaaaacgtgagatgccatgaggctgaggcaggcagtgtccaggagttctaggcctgtctggacagcatagggagactccgtctcaaaagaaaactcaggagcattttgttttagtcaccacagctggattaagccagggctgctcctctacagccaatgggttacaagaggaagcaactctccactctatagcctaggcctggaggggtggagcatgtggatgaatttaccgcattctgaacaatgattttgtgttaacccagaaagcactgggaagctgtttaagaaccgagggtactttgaggtccagtagaacaaggttccattactgatcagattgtgcttgagaaaaatggatgctaacatcatttttttttttttctctcccgagacagggcttctctgtttaacaaccttggctatcttggaactcattctgtagaccaggctgggctcgaactcacagagatctgtctgtctctgctcccgagtgctgggattaaaggcgtgagccaccagcactggactccactttcttttaaaaagtctttaaaattatatttacttatttgtgtgtggccaccggcgtgccacggcattcgtgtgggaggttaaaggacattttgcaggaatcggttctctccttccgccacgtaggcctagggatcgaacttgggtgataaggattggcagcaagtgctttcagccgctgagccaactagcccgctaataaccactcctcaaggcacacattctcctgccttaaccgcattggaaacacctcgatgccactcttggactttctgatgcggtcggcgggaaccaattatttgcacttggagccaattctaactcatgctgctgcgggggaacgtcggaagcgctgtcctaacaggtcctaaggtcccaggagacgcgcttaccaccggtgctgccactcaagcgccgccctctgttcccggcccgcccacctcgggacgctgcccaatcctcgcctgggaacgtgacaacgcccacaggtcagacagcctgtaagaaggcaggtaaggggtggagcccgcgtacgcactgctgcgcctgtgcgcgacagcgaggggcgtggcccagactccaggccggaagcgggaggctagaggggcgggccggctggtgtcccctttccggccggtccccatggaggcgctggggaagctgaagcagttcgatgcctatcccaagactctggaggacttccgggttaagacctgcgggggcgccaccggtaggtctcggagcgggcggggttgtggggagggagctgtccccgcgtttggcccgggctccaggactctccctggcctgctagaggctgaggggtgggacacaggccattccaaagctcgctcccgttctgcagtgaccatagtcagtggccttctcatgctcctgctgttcctgtccgagttgcagtattatctcaccaccgaggtaaggggcgtggcctcggtcgtgggcggggcttagcgttctaagggtaggaccctgaaagccgggatgggggtaaggccaaatctgactgaggtggtgtcgcgccaggtgcatcctgagctctacgtggacaagtctcggggagataaactgaagatcaacatcgatgttattttcccgcacatgccttgtgcctgtgagtacccgattgtaggtgggggggtgttcaggtgggcttccagatacacgcctctggccttagatcccggaatggatgccatgtcatcctcattcccctagtccagttcttccacgagatacatccttcctatcaaagctcagatctccaggttcctggagtcatagtccgtctctgtttccagatttaagcatcgatgccatggatgtggccggggaacagcagctggatgtggagcacaacctgttcaagaaacggcttgacaaggatggcatccccgtgagctcagaggctgagcggcacggtaaccgatccgagagccggacatactcgcactgccttgtgttagtgggctgctgcaggctcagtgacacattagaagtcagctggcttgcctagggttctccagctgtgaagagccaagagtcggttgaatccgtgcttctcatatgagcacattgagtggaataccttaggagttggagagatggctcagcgcttaagagcagaacacttttcttggttaccatactctcaagcttaagcaggggtcttctttgggtaaaagcttgttgtgtgtttaccttcccaatgcattggctaaagtactttccccctttgcaatacaagtggcctaaggttaagagtttcagttctcaagtagaactgccttgcaatctctgagtagcaactgtaaagtagtggtaaacagtagcaccccatacatgagataaaggatcagaggcagacagatggttcccagctgaaggtatgagagcatacacattcaacctttctgctctcctctttcagcagaggattcagtaagttattcggagataactcagtacttcgttaggaaatagtttctctgccagatggttttgcccagctgtaagctgtgtatgtattctgagcgtgtctaaggcaggctagattaagctatgttagatgtactaagtgcatttttttcaagtaagatagcttatccacatgtaaccccatcataagttggggatcaacaatgtgtatgaaagacctggtatagttttcactttcacttcctgtttctaagccgctgtctcttaccctcaggtccatttccttccccctctctctctctctctctctctctctctctctctctctctctctctctcgacaggttcttgatagggtctcactatgtaagtcttgctggattagaaactctatgtagaccaggctggccacaaattcacagaaatccacctgcctctgcttccccggtgctgggattgaaggcgtttggtgtttgctattttcctattaatatgtagtgcatgtaaagtgcttcttcacacctgactcatggaatatattgtataaatactagcttttcattttttgtggtcaaaggactcctgtgggaaccagggttgtagatgtcactgcgtctgcttcatgttgtgcttttgcctctgtcctctccttagagcttgggaaagtcgaggtggccgtgtttgacccaaactccctggatcccaatcgctgtgagagctgctacggtgcagaatcagatgatatcaagtgagccaggccctgggcatggagtaggttcttatcagtcactgtgattagctagccgcagccgtgttcagaccgctgggggtaggatgtgtacttcggcactgatccccattcatatgataaggttaataagcaggcctggcctgacagctgcagatcgaggcacacggcataagaggatggtcactgctcttcagcctagagaagcagtttaaaggttgtctctgacttcggttatccttgtgttcagtccgagccacctcacttctctattaataacagaggctagcaacaccttccttgcaagagtcacataaggattaagtgtgtgttgtatgtaaagccctgaagtacaaggccaaagccacaagcctctgatatgtgctaacggctgtgtggtttcccagccctgacttctgagagactgactcaataggtttaggaagatctacttttttttttttttttttttttttttttaaagggaaaaaattgggggaagtaaagggaagaaattggtggaagcaagattgttaccattcagtgccaaacaggcacaaggccctggaatccacaggaccacacacaatacaataataatagtggtacatatagcctaaagtttgcattttaaccattgttatcatacaggtcattggcattaaggacattcacaatgtagtgtgagcatcactaccttttctcctcggagggtcacagccccaagccacagaggaaggggtgtgtgctctgaatactgtgcccaaactgaggagacagtgagaacttggtgaccagagaggaggctggcagagcctctgcagcagacaactgtctgggctttcctgcccagggtgccagcccttgctgtgctctcaccctccacgtccacacctcccgctacaggtgctgtaacagctgtgaagatgtgcgggaggcataccgccgtcgaggctgggccttcaagaacccggacactatcgagcagtgtcgacgagagggcttcagccagaagatgcaggagcagaagaatgaaggctgccaggtgtatggcttcttggaagtcaacaaggtaccaggagggaaggaggcaagacgggctgggctgagccaggctgggagaactccacagttgaagtggagaatgagaggaaatatcccctgcaggtggctggaaacttccactttgcccctgggaagagcttccaacagtcccatgtgcatggtgagtgatccagagtcggccaggggcatttagctctgggttccttcttggcaggttggcatgcccctcactgggccagtgttctcttagctttgagccacagtaggagagcagtttagcacacttgtgaagagaatgggggcagggtatggcttggctggtagagggcttgcctctgtgaagccctgggtctgatccccagcctgtgtggtgcaggagttaggactgtagcacagagcctgtgtaagtgctgctttgtttaagtggtagcccccccccatcaggtgactgtgtgtgaggctttgggtcagcaaagctggattggaactcaggttttgtgctcttgagctgtatttatgtatgcattcgttagatacctagcgtgttagtctagatatagatacagcagtcagtaaagtgcctgcactcagaatattcaaacagacgtttggacctggtccacatacctataatctcagcacttgggaggtagagacaggttgtcctcatttgtataacatgtttcaggctagccttagccacatgagaccctgcctcaacaccctctctccaccaaatatgaaaaaaaaaggacaggtttataaaatatgtgatataccctctactgttaagtagtgagaccaggcagagcctggtctacagagcaagttctaggacagctagggctacatagagaaaccctgtcttgaaaagaggaaaaaaaaaaaaagagagcaatggagaccaagcctagcatggtgttgctcacctttaattctagcaattggggggcagagacagacagatctctgagtttgagaccacctggtctacatgattagtgttaggttagccaaaactacatagtgagatctgatctctaaataaacaaacaataatgtggaccagaacaaggcagaatagagatggttgagggacagagcatctgctgtttagttacagtggttgaggaaagactggggtttcacttgctcaaagagctgagcacagtgaagcagccagcagtgttgatgtccacggcagcataacaagtagagagggcagtaaatatagatcctaaaggcctgagtgtgcttggcaagtgcctgggacagtaagaaaggatggctggaacagagtgagcagatgagcatagttgactacaggtgtgcggacagctgcatagggcccgagggaccaggcttctgtgctgtgagacgctaagaagggctttcaggagggtgtgatgtgactgcacttaaaaaagtaaggtcaagcatggccgggcagtagtagtgctcacctttaatcccagcactagagaggcagagataggtggatctctgtgagttcaaggccaacctggtcttctgagagagttccaggacaggttccaaagccacagagaaaccctgtctcaaaaaaaccaaaaaataaaataaaaaaataaaaaaggtcaagcatggtggtgcagacctttgatcccaacactcaaaaggtagaggcagggggatctctgtgagttccaagccagcctggtcagcataagttgttccaggtcaacctggcactacaagtgtattacagggtctccatagtgagaaggctggaggacgaaaggacagacaaggggcgtcagtgaggagttctgcagtgaccaggcctggcagagaacgtggctcagagtggtggaggtggagaagcaactgggttctggatacgttacaggtagagctgagaagagctgatagatgtgacagagaaggacaaaggagtccaagatgccttcagagtttatgcctaagtagtggaaagattggaactaccatttaggagactcaggaggactcggggtggggtggttatttgaaagtaagtacagagcagatatctagactagtaggattctcatttcctaggccctgcggatgccaaataagtgtttgcctggagttcaaggacagagactagccaagagacagacgttgaaccctcccacatatttaaagctatgggactccatgcactctccctgcaggtgaactttgttggagaagggaacctgagtactaccaggcttcttgtgttagaggccagcggcatggggctgtaaaggagactgtaaggatggctggtgaggtgggagcttcagccaggagtgtgccatcctaagagccaagggatgggtactcctggataccaagcaaaagatgaaggttggttgttagtgtagtggtcgttggtggccctgacagaacatgactatgactagaaatgcagaaaagtgtttaagatttgcattagagcaccaggtgctcgaaactgaaactgcagatgggcgccattactaccacgtcacggactagagcaggggttcccaaccttcctaatgctagtaccatttaatacagttcctcgtgttgtcatgaccccaaccataaagtgatttttgttgctacttcataactgtagttttgccactgttatgaattataatataaatatctgtgttttccagtggtcttaggcgacccctgtgaaagggttgctcagcccgtgaggggtcacaaactgcaggttgagaacgctggtttagaggatggcaacagaactggagactggggggcggaggacaagactgaggaggcgtgtccaggaactggtgcgcaggctgtcagatggctcatgtacagggctgtgacaagggctgaagtgacacagcgggtctggagaagacagtctaggccttgagcgtgtggaaagagcaaactccagccatggcaggggagcagaagcgctcatgcagtgtctctcctggcttcttctcgggcagaggaagcaaggtcattagcgaaggctgtggagaaagggatggcatgctggaggcaacagggggacgtctttggtttcggggacagtgggtggaagtgagagcacctgtgggattttctggggtttagtgttgctctgtgctgcacagacaagggagtcaaagagtatacaaagaggcaatcacagagctggaccatgggaggaaagtgaggactcagggtttgggggaggagtagacgccaatgaggaagcggagaagcaccagactgccgcaggcctttggtgtggtggcaaaggatggttggatttggggcactgcggggccagggaaggaacaggaggaagttagcaagctggcagttggagcatgaggtgcttgtggttgacactagagaaggtatagctactgctaatgtcagggttagggaatggtcaccatggtggtctggagtgggagagaagagcagggaggcggggctgtccaggaactgggatgacagggtgttggaaggctcgtgtacatgactatgggactcaccaaaagctgagattcgggtgccataaaggatgggcaggtagttactaaaactgtcctgggggtgcctggtggaatttcatgattaacaagtagggtgccttgaactgcctgggagctaaggactttgactgtagatcaggggacagtggtctgaaaatggcaggaaggagctagaaggacctctctcttgactacagagtggataggtatgggagaccaaacagtagttgagacgatggaatggagctggtgcctggaagagaaagtcaggctgcgggggaagcagaagagtgaagggccaaagtggaggctgaagatgctgctgctacctggtggggtgtgggtggggtgagaattaggatcatttgggagatcgctaccagccaagaggattccagaggacaagcaggacctggtggttctgagctgctcccagtgactaaggtgggcgggcgtggggtcctgtagtctctcatgtagtctgtacctgcagagggggaaggcacaaggagaggtaggtggcctggaggaccctgaagagctctggaacccccacccacccctttactctggaggaggccgagtaaaatagatttcctgagaccataggacgacatcggtgtgtcactgtgtgaagctgtggactacaggccttcagacactcgggagggggctgctatcacaacagcatttccgcctgcacctctgcttaggtctaccttctgggtcatggaccccggggcagctgactctgagtgcaaggatgctcatacacatatggctacagtggcccgtggcccaagatctgccattgagtcctcagagtgcttttaacatcctgttggttgcagggtgaacaacaccagggggtataaggtcttgtgaagttgaccaagcatctgcccctcctagaccctcaggtcagcccttggcagacaacaccggccaagtgctctgcccaggtcacacagctgggggaggacttcgaggctctaggtctcattttgttcttaggctggctgtttttatgcttcagccctcttttatgcctctttggtcctggaagaggccttttagctagggctagaccctcgtgccaaagcaggagtctccatcctccccgctactgtgggtcttgctccatagatcccactggagctctgaatctctgttctcttctcccttccccatgctgcagttcatgctgtggagagtaagtggccctgcccccaaggatgccctctccccacttccaaagcagcctgccctcctggaatggggggaggtttggatgggtctgggatagagccttctgaccctgccgctgggtgacttactcctgggatgggctttgacatggggttcctaacagtgggcaattggggttaagatgggaagaaactgctggttcaaaaatccctttggggaattttgagggtagaatcaagggagtccctattgatgttggggtacagtaatttgtcagtaactctggttagtgagagacctgtccgtgggttttgtttcctgagataaaagcctggccgggaaatctgtgttcttgtccaccccagtgggaggctgggaaccctttacccaggtgcagggcaggctctggccagctgtgcttaagcagggccagcgtatcaggctgtgggtgactgaggggtcagagcgtcatatcccacagggaggagtacggcctgaaaaaagactcaggaacctggtcctgcctgcctggtgactgttttcttcttctcctagttcatgacttgcagagcttcggccttgacaatgtacgtaccaggcggaaaccatggaggatgggtggcaagagactggactctgctcatgtctgaaatggggagaaatcactctccatgttctgctggtgttcagacccagggcagagatcgttggacgggtgcaccctcaacagaaggaagctcagagcaaagccaggacagagtgtggcatttctaggaagctggcagagttggcagggtcgaggccttgggactggagccacactgaggagtctgccttttgagaagaggggccacttttgcctcaccttaaccaggggtgtgacatagttagatttacatttctaactgtccctcaaggaagctgccagttggggcttctggcttagaccttcatcccttgaggtgtgcagacaggactagtgtcaccatgtacaatgtggctgcttgaagctgtaccttaaaccctagagcccagaaatctgtggactgaggagagatccctaagtgaaaacaagtgcctggtacagacacttctcctattaaagccatagcttctcctgtacagggccgcttccttcctccctcttcccacctgcgctcacagccttggggaacactctgctactctagctggttttgtgtgggttgtgtgctattgggcctcagacagatgctgatgttgtgtgggtatgtgctatcgggcctcagacagacgctggtgttgtgtgggtgtgtgctttcgggcctcagacagacactggtgttgtgtgggtgtgtgctatcgggcctcagacagacgctggtgttgggtgggggggtgctttcgggcctcagacagccactggtgttgtgggggggtgtgctatcgggcctcagatgctgatgttgtgtgggtatgtgctatcgggcctcagatgctgatgttgtgtgggtatgtgctatcgggcctcagatgctgatgttgtgtgggtatgtgctatcgggcctcagatgctgatgttgtgtgggtatgtgctatcgggcctcagatgctgatgttgtgtgggtgtgtgctatcgggcctcagacaaacactggtgttatgtgggtatgtgctatcgggcctcagacagacactggtgttgtgtgggggtgtgctatcgggcctcagacagacgctggtgttgtgtgggggtgtgctatcgggcctcagatgctgatgttgcttacagatcaacatgactcactacatcaagcacctgtcatttggggaggactatccaggcattgtgaaccccctggaccacaccaatgtcactgcaccccaaggtaccatcctgggaggtagccccctctaccgctaacgcccttcctggtgcccatgccctgtgcttgcttctcctcacagcctccatgatgtttcagtactttgtgaaggtggtccccactgtgtacatgaaagtggatggggaggtgagtcgagtataggcgtccagttcagcttgttgtcaagctctcaaagtcctgtgtgtcattactttggcccggggaatgaggtactgctctcactcctgtgtgatggatgcagagctgaggctccagggtactgatgccctcgtgggagacacacactagacactatttggtcttcctgcctcccacactgcctccagacagtccttgggtgcttactgaccccattgtctgtgctgacctgggggttggctaggccaagcctccttgggcctgctctgttctgtggtctggaacagctgtctttggggtggtgtgacagggctgaagggcaaggatgtgagtcctagccttagggtgctgcctgcaagagtttcttctcttccctgtactaccagtgaaagtatccatcagatgtagctaggacaggcaaaaactgataagatggtggactggaagggaaacaaggatggtccccaggccttgtgttgctagttaccaactgggagcttcattctatctcttcatatagtcacagcctgacaagaagcggggctcagaacaaccctgagccaggttataaacctctctctgcttctggttcccttcttcctgcaggtgctgaggacaaaccagttctctgtgaccagacacgagaaggttgccaatgggctgctgggtgaccagggcctgccaggagtctttgtactctatgaactctcacccatgatggtgaagctaacagaaaaacacaggtaaggagtgggagtggcgaaggctctgagcctgcgagagcagggtgcctactgagccccccttgtgccctgcaggtccttcacccacttcctgacaggtgtgtgcgccatcattggaggcatgtttactggtaagtcccagagtccctgtttggggagcagggtgcccaggcttcccgtgctgtgtttgggcaggtgttcccccactgagtggcaccctcagcaatgccccaggctttggttggggaagaggggaaccttaagggccaaggacaatgctagcctggccagttagatggcaaggcagggtccacatgaggggtccagtgctagccctggtctctcttcccagtggctggactcatcgactcgctcatctaccactctgctcgggccatccagaagaaaattgatctagggaagacaacgtagtcatcatccttccttgtcattcttcctttcctctgttcctgtgatcactcctcagccttcactaccccatattcctcctctccagagtcagcccagggcgataaacattgtgatactattgttgctctcagtgtgattcttgggatctggctgaaacctaggaacagcgccccctcacagccacatgaggtccatcatgactgacaggctggggccaccccccttttggggtcccacatatgcgtctcctgtttaatatggcttcacagccatgtccttagtccctcttcttctgtgactgaatagaatgttctagggtaaatattttggaagccaccatagcttgtggaatagatggctccagtgccattatcccagagctctgagtccaggctggattgtgtcacttctgcagtgatggacagctaaagcagagggggcttcccacagcctggactcagtcatgtggtccagctctctgccaagccccatagtgtctcggcattgagaaaatagacctttacagactcctaaatggaagcaaaactgaaaaacagggagagaggtggcactgccattttggagcacagccagcaccagatccttgactcaggacccaactggggcttcttgttagagcccttagctctgtgtagagaatcgtggcccagaggcctcactgctccacagcccagggagtcaggacagcggacagcagtcagttcatcagctcttctatttcccctaatgacagcaaaacctccggagggtgcctgaggtccaggtgatttgatcacctgagagttgtcaatatcactgaggaattgagggagatggccctttggtcacctggggaccgtttcccttgttaaaccgggcaacctacccaccatcagcctctgtggttccagaggaaggttggtttaccccatgcccttaggaaggtcaccatctgagtaggccagccaccagacccaagataagccaggcccctctgaaggagggagagatggagctgcacagtgctcctccagttccggggcaggctgtctgcaactgtcctctgggggcagcaacagccagtgataccatttaagccctatgacaagctacttgaagtcagccaaccaaaacaataatttccctttttgcttaagccaatttgggttgagatttctttttcttgacactgaaagctttagcagacatccttgctctcggggttggtaaaaagttagtggaacaaagtgcttaggtgtcatggaaggtagagccatgagcagattgagggcaaccagcctctggttggaatagaaagcatgctgcgggggtggggggttacaggttgacacagtgcacttaatccttagggcttgttcttttctggggttgcatgtggacagtcttcgagacagacatattgactataagtttattataagggccggtagaatggggagactaagaagaggaacaggggtaaatggctgaccgccatggccggtcgccatagagagacagagcgggaaacagagaggggacagagagagagagagagacagggggagagagagagagagagagagagagagagagagagagagagagcgggaacagacagagagcgtaaaggtgcaggggcctatcttttaaaggggtcctctgcacctgcgtgcagacttctttcccatggaaccttgggctgaccagggtattgcctgagtggattccaccaggtaacaggggcaggccagcataatgcctgaacctttcaccaagtactgaatcctgacagctcacgttggaaggaaggacatccagagcagggttgaaaggttggctccctgagctgtgtctctggtcccttggattagtgtttgtggatggggctgaagatgacctcgctgatctgtccaggaatagtgtagaagacgaggagcaggaagacagtgatgagcgcaagcagcagcagcagcaccaggatgcgccagtaccggcgccagatgaagaagacgaaagtcttcagggggttcacaaaccaattgaaggaggttttgggacggctgttggggaagggtggagtcacatgaccaggaagcccctgacagcggccccgcctccctaagctccgctacttacttgggcttctccagaggctctggctcttttctccccttcccaaccggccgcttctctgcctcctccacagtcagtagttcaaactctgcctcaaccttcccctagaaggagatggtggggccatgagtggacagagcccagccctgagccacgtcgtggtcattacactacgcaccgtgaggatgtagacattgccaccggtgtctgtgaactccaggtcttccggccgtcctttcctcctcctcctcctcttgcgtttcttgccagcctgagcctctcgggcctcccgctccacatcttccatttccctcgtcttcactacaggccaccagccccgcagtcgacggcagcgaaacagattgcatctcggcccagccccatcaagggctagtcgaacagaacactgctcagggacccgggcccccctcaccatgtctggtagctgcaactcgagggatcctgtgagagcaaaactcacgaggttagggtaaggggtcaaagagacagcaccccagagttgcaaagtgccaaaagggagaatgcagccaacggtcagtccacagctatagacttcctaaccagtctagctaccagcaggtcccaactggaggtccaggaccctactgccaaagcaaggatcaaaggccataatgggaacccagagcgactgcagaagggtccagggggaggactgagacagagccttgggtagaaaggttactagccaggctgcggtggcgcacgcccttaatcccagcacttgggaggcagagacaggcgatctctgggggttggaagtcagcctggtctacagagtgagtttcaccacaggctccaaagctacacagccaaatgctgtcttggaaaatcaaataaacaataagtaaataaataaataaaggaggttgctttgcagcactccctgaacaccgtgattaggtagaaaactatgtttcacgcttgggtctaaaatcgaccacagggctcaaagtttgcttagagtaggaaccaagggacagagaggaaagggtggaggcaaggcaaataaggacaaatcaaatgtaggcttgaggctagaaaaagccaagtaccaagaaagtcgttggcggagattcggtcaaagtcccaaacctgcagcgccagcacagccggctgccggaactcagcctcctccagggcgaaaggtccaggcttccgccggacgctcacctcccgctccgtaggcaggtagtcaaagcgaaacacaaagcgccaattgaagttgccctctccagtcagggaattgaagtggacgtctgtctcctgtttatcatgctccagcccctttacccaactgggtgaggaaggacacaacccaggtcaaggtggtgtcagggctggggccacacccagaactcagctctctgcacagagggcctgaacacagggtccccatttacagtttcctttagacagccatttggtgagccggcctgcaagcctaccttttcacatagatgtcacttgacatctctccagtgagtgggttcacatcatccagaaccacatcttccgtgttccagatgacaactcggagctcatagctggggacacagtggtttccgactgttgagaagggtcctgggagtgtgctggcctaacactacagtcctggtttgattccccagcaactcttaaactggggtggtggcacacaggattgtaaatccagctgctccagaggtgacagaaggagcacctagagctcatccttgaggctatatgaaaccctgtccccaaaccacaacagccaacaaatcagttcagttggtagagtgaactaccatgcatgcacaaaggtcctggggtcaatctctagcgcacatacatggcaaggtgtagtggtacatgcctgtaatcccagcaatggagggttagaggcaggaggatggagagagttcaaaagccatccacagctgcataccttgttcagtgccagctggttctacatgataccttgtctctaaagacaaagggggggacagctgtgcaaacagaaaggaactaggtaggtgtcactgaccccttccctactactacaatggcaccacaaggcatggtctaacccaagccagtacaatgaggtgtcagaagctgaaaactttgagtggttcaacatccaccagctgcagggttagagccacagcaagccacatgctgtgcaacgcacagtgctggggtacagagaagtgtgaattgaaaagacaaccagagatagatgtttctggttcttccccggtacggccccgttgctgtcatggggttgcctggatatctcttcatcccttcatttattgattctccctggttttgtcttcttcagataaggtctcatgtagcccaggccagccttgacctctctatgaagcagaggctggcctctgaactcctgatcctcctgcctttgccttctgagtacagggatataggcatacactaccatacctgttttccctagaattctacccaaccacactatcaatctatatggttctggtgggaaggcatctacccaactccaggtttgggagaaccacccagaagtagccaatgtgaggtatcccagccctgcccatagtaactgattcagagaagagcatctaacccctgccagtcagtggaagtggctctgggcttttgctttaataggattgggtatttatttctgctcaagagtcctggctggtaagagatgagtccggcacccttagaagttaccttgttctttgtggactgcaaaaggctctctgaatggctagagggacaactcagtgattaagaacacttgctgccaccaccacctaacttgttgcggggtggtggtggcgcacacctttaatcccatcactcagggagcagaggcaggtggaccaccgtgagttcaaggacagcctgctctacatagtgagttccaagataggctctaaagctacatagagaaaccctgtcttgaatacccccggccccaaaaaagagcacttgttgctcttccaaaggactccacagtgtggctcacaaccatctgtgactctggtttctgtgtctgtatgttacatatatgcttggggcctgcagagatcagaagagggctgatgtggaccagtgtctgagtgtgacaccctcacagagctgcacttgggctagctggggtagaacagggtttactgaaagacatttggactctttacgatacccaacgctcacagattatggggaagaaagtgtaataactcacctgcccataggcctgagtcagaagtcttggcctgacttagtgggagctcagattttcagagagtagaggggccaaaattctctcacctgattggctgacgaggcttaatgtcaactgggggcggggcaggcacatcactggggaagatgtcgatccacatatgaagggatccctgagagcacaaaaccaggctgcagggtcatgctcgagaactcttctctctacagccttgcatctggtggctgccctgtccccagtggggagaagggacaggggcaggagtcatggggtagatttgggggtattcaaatgaaggtagtagagtctgaaatgagggtcccacagtcaaggccaggtttgggttcaggaagaggcggttccagagtgagaaaactgaggtcaagagtaggttgtggtcttgaggcccagaccttagtgaatgagggtggagctcagatcaggagccccaggtctcacgcttgttggctcagggttggggatcctgtaggaccagggtgtgtgtgggggggggctggatagtaagtacagcctgtaacagaggttctcactgacaccagaagcagggtcagtggcggtgtagtgtgtgggaagagggcttggggaaagggtggtggtggtggtggggtgtctcaatgagtcttgggagtctgaggtcccttcacctgcagcagccctgggctccgggggtggtacaggggccgtgtttccacatgttcaggtaccagctggatcccaaatcctggcatctcctgccaacgccgaagcacaagcaatgcttgggcctcttcagaagcctcatttgtccccttgggatccctgccatctgaaacaagaggggtgtggacttgggttcaccacagtccccagctctcctccctcctcagcacctctagataaagctggttgtctatacatggcgtggtggtttacacctttaatcccagcagagttccaggagtttgaggcaagcctggtctacaaaatgagttctaggatagacaagactatgtagagacctccttaacaactatgtccctcccccagacaaaaagtctgtggcctgcagcctgggagagcaagtccaccattcacaaaaagcaaggggtgggaggtggggggtggggggggagggtgctgctgctgtcactactcctgactgtgaagagccagcagcacctttgctcaagaccctgtctagagacgaggccaccagccatttgaagtgtgagctcaattccacagccacagactgtgtagagctctgtatcctgtgctctgaggggtctacctaagatcatgttctcccagcagccaggagctttgcccttactcagacaaactcacaaacatccctgggcctactgccatcagtgggctctcctgggtacactagcccaacacctgctgtgtcctgtgtctcagtctgcctccctcatactcctcgtggcctgcccagcacaaagggtctggtacctgaaggcagggcctcggacggtgtcaggaagactctggtgcccaccttgacagccccagctctgtattcaggagcagggaggccacagcgctggcacagccccagcagaatctgtgaaggccggaatgcatcgcgccaggcattgtacccatccctgcaggcagaagaggaccatgcatcagctagggcagtgtgtgggcacaatgggcacagaggttcaaagaggtcaaatgacttactagtaccaaaaccccaataccctagctcaagtcttggctactgagctaagatgtctttcaaggggtgggagaagttctcctgtaaaactataatttgtatacaagaatggggatgtggcagctggagggaggcaactgttcagtatgtagagggcttgttgcataaacatgaggacctgagttcaaatcccaggagcccacatgaaagttgactcgtagggcaagtgtctgtaataccagcacttctatgggagatagaaagttcaaggagactttgaaagttcatgagccaggtagcctggctcacaacagtgaggagaccctgcctcacacaagatggaaagagatgaacaacacccaagtctgtcctcagaccttcccatgcatgttgtggaacatgtgtgcccagattctcacacatgaatatactcacgcaaacacattcaaattataataagattaaaaccatttaaaatggaaatgtgagcttcaatgtgtttcatgaatgggccctgccagactcacacatcatactgtgaggctagcccacagttggctctgtggtggctataaaatctgttctccaggtcaatccgtgtctccccaatgaggtcatcagagcccaccaagtcatgatcgaatatggccacagtcagctctggctcggctgggagggaaacactcagctccaggaccctggccaggaaggaaaagtagctaaggacagttccatgcactctgatgggacctggagtggcagtgtccagccccccaccatcagcaagccaactgcctaggccagagcatttggagcccaggaacccccaattcccaagccagggcccagcctcactctccaaagatggggtggagttgcttggggatgtagcgttccttagtgtcccgctgctccttgccagcgctcaccaccacataggggtctgccttgccattggggtctgcaggagccaagttggtagcctagggggggtggaattcaaatatagtggaatcatccttgaagcctaagcccttgtggaacctgattacaggattttatgagctgctggaggtcaaatccaggttttcctccatgctggtcaagtactccattgactgagccacaccatagccctggctcttgttacactgtaagagataaatcagtacaggccatctgcagtatgaggtgtgtttagaactcactggggaagtcagagacgcagggagcattagggccctatcttccccagccagcagtggttgcctatctggtgttaacagttcagccaagggttgaaaagttggaaaaatctcctatgtgactcagcccatagtatgggccaataggataaggtttggggaggggacagtactagacactgggaagattatactgccctaaagaattcagccaaagagaaccgcaggctcaggggatgaggggggcaatgtgctggggatctgttagtcttcatgcttgccaagcaagcactctacctaccaagccatctcccagccctattcactcttgagacagagtctcaggtagcccaggcacgtcatggctgacgataactttgaacttctgaccttcctgccttcacctcctgcgtgctgggattacaggcatgtgcacacttgctttgcatgattctggggattaaatccaggtctttgtatattctgggaatgcactctacaaactgagctatgtctccagtccttggctggtcttgaacttacagtccttctatcttagcctcctaagcagctgggattacagatctgtgctaccaggcccagctcgagttgtttttgtgtgtgtgtttgtgaggacattcgtatgtgtgcatgtatgtggaggtcaaaaagtgacttcatagcctcagatgttcctcagagtcctttttttttttttttttttttttctgagacagcatctctcactggactggaacttgccaagtaggctagcttggctggccagtgaaccccagcagcctctctccacctctccagtactgggattacagacatgagtggccacaccagcttgtttggccctttttgtttgcccccttgctttgggttgttgtcttgtttggcttagtgaggagttttgttttaattttattttatgtgtatgagtgttttgcctgcatgtgtgtctatgtaccatgtgcatgtttcaggcaggggccaagagagagcagatagatctcctagaactggagttacagatgcttgtgagctgccacgtgggtgctgggaattcaatctaggacctttggaagaacaaccagtgctcataactgctgatctcctctcaggccctggctggtattttgatcctcttgcctccatttcccaaatttggggattactgatgtgcactgcactcagttatggcttggggtttgtttgggttttggggttttttgttttgttttgttttgtttgtcccactgtataggccaggccgacctgaaactcactatatgtagtccaggctggcctagaattcacagtaatcttcctgtctcagcttcctgctcagcctagtgctggggatggaccccaaggcctggagcaacactttggctccagtgttctgagcttctgggctgtcatggtgcacagctttaatcccagcacttgggaggcagaggcaggcagatctctgtgagttcgaagccagcttggtctacagagcaagtttcagggcagccagagctatacagagaaaccctgtcttgaaaaataaataaaaaaaaaaagtgttctgagctaaagctgggctcccagaactgaggttttctggattaaacagataatattaatataaatcccagtcttaaatcaatgtggggggcacactaaagacacattccccaggaagacactgtttccctgaaacagcctccccttcccagtggacaagctgcctctcagactctctctcaaggaggtcctgcttcatgcagggtcttgtctccagccccctcccttgtcagactctaggaacccaaggccaaggtggggacaaactaagctgagctctggggcacatggcccccttggaattactgctgccacctcctcactcggggaacaggaatgcttccctttcttcagagctttgtgttcataaaaacagtctttgtctgacatgtctcaatgtattacaaagtttatctcagagcatcctgcctgccatattgctacaacacacaggcaggatgagtcccactccctagcagtaccctaggaggactgtctcttccagtgatgtctcagaatccctaggtcaggccgcagcatctgctccagggacagagggacagggatacagggacagagcaacctgcttattccctgtttctccccaagactcctttaagaaaattccaggaccctgctagtctctgcatgacagccatagcaatggaaggaactacagggtatttgacaaaaggcattcaggatttggggatcctccactatagccttcggctccccctggccccagaccaaaagtctgcataaggcctgccacaggcaagctttgtgaggagaggaagtctaatcacacccaagatttctacctaaacccagaggagccttcgagagcctttgtagacatcaggctgttgcctctgctgccatggggatgagctagggactaaggacactcaccttcactacgtacactctaaccagaagcttgatgggccggttctgggggatccccctggagatctggggttcagagaacgatgctgcctctgactcaggataaatgaggaaggagccctgaagtcggggagacaggaaagcaggaaaggagttggtaagaaaggtgttttgttctgttttaaattacattggatttattttatgtgcgagtgttttgcttgtgtgtatgtctgtgtgagcttggttcctgagaaggtcagaagtgagtgtcagattccctgaaactggagttagggatggttgtaaaccacgctgtggcactgggaatagaaccacgatcccctgcaagagcagccagtgttaactgctgagccacctctcagcctgtatgaaagcttgtcccttgtcagtctcccattcttcccccaagtataccttgaatttgcccaccaagtgtccagaaccttcctcgccatctccagcctggccgccttgccctctgtacagggggaacacattcagccagtcctcaaagtggttaaactcctcctctagggagctgttgtagatctgaaaggtgaggggtctcagtgacaactctgttccccaaatccaaggggcacccttctccccaacaccttgtcaccttcaaggtggcgattgctttcttctgaggtccagacactttgatatcagttcttccctgctcctgagcctccctgtccccagaaatgaggtgggtcccgtctggaaacagcagaaatggtccaggtaagaatgtggggacagggatgggtggagagatggagcaagaacaaaagtcaggactctcacctgggtccccagcgtcctccatctcatcctcatcaaagccggactgaaatcaaaagacaggtcggaggtagcccctcccactgccccccttggcccacccctcttcttcagccacagtcacttctttttaaagtcccctctattgtctaaacctatgctgttgacttcagtcaccaccacccacccacggtcactgagcccttgaagtgaggtcagtctgcactgtgaggtggtgtgagtgggacacacagcagacttactgtgagaatgtaaaatagcatattactaatttttatgataatcactggttggaacaatattttgtatacattaataaaacagtaccaaaaattattctcatttgttccctttcactttttaaatgtggctattaacaaaaattaaaataaaaaaaatttgagacagagtctcatgttggtataagctggctttgaactcctgacctttctgttaccacctcccaggtgctcactggagaggtgtgtgtcaccatacccaagtttaagagctaaaattctacactcatgttttttgtttcagagacaggtctcactgcctgttatatagaccaggctggcctcgaactcacagggattgatccagtgcagggattaaggctgtgcaccaccatgctggcctcatgttctttttttttttttttaaggatttattgtttattatgtatacaatgttctgcctgcatgtatgcctgcacaccagaagagagcaccagatctcattatagatggctgtgaaccactatgtggttgctgggaattgaactcagaaactctggaagaacagccagtgctcttaacctctgagccatctctccagcccctcatgttctattttattagagcaacagagtgttgggaggcagaagtactaatgtccaactactaaaattgtggtatagaggagaaaagatgtccgcaataaagagctctgggacacacagtggtcttgtttgatgagactccccaccttcttgcctttcctcccccagttcctgccctaggttgtgctgtgcccacctgcccctggagctccatccacctgcccctggagctccatccacctgcccctggagctccacccacctgcccctggagctcctgcagtgaggcatagtacttggaccaccagtccatctcttctgggtctgggatgtcctcctccagctcaggaccttgacccaggagccctaaggtgagcttcttcagaggagcctgaggcagagaggaccttgttgctctcagtcagcaccaccacaaaccctgacatccccctctccagcctcaggaacaccccatcaccttcaggagccggctggattgtcctgctttagccacgaaggggtccccagactgctctcctggaagtagggaagttattccatgagtttaggccagtagaaatcgaactgcaggccccactgggcggtccactagagtgtctctaccagggtccagaggtgcttctatctggtggcccctatggagaaagactcctaaccttgaggtccctttggagtcaggtctcttgtatcctcctctatttcctcctcctcagggggatcctcatggccctggagtgtgaatcgcagcatatgggggacaatatgggaacccacaaggacagttcggccaaaggcccggttttcaatcaccaggatgctgagtgggggctgcaggtatggctgttctggtaagtcctagggaggggaaaacaggaagtaactccaaacctgggggggggtacaaagtcagtgggaacaaggcattctgggctcagatctgccacacagtcagtcattatggccttctgactctctgccccagctgaagaagggacacagcactggactcaacagactgttctaagttcggtgaaacaactgagacacctacaaagtgcaaccagaaacacagttagcattgttcttacagggtaaatgctcagcctgcagagagagtgtcagaaccattaaaatatgtatggaccttggacaagtgattccctgtctgtccctggtaccccagagggatgaagatagtgattcttattatatacaaagaggagaaggaatagagctacaccagagaaaaacatctacctttcccttgaattattattagtttttaataagatgctatgtagccctggatggcctgaaacttgctatgtagaccagactagcttcagagttgttatgattttcctgctgctgccttctgaattctgggattacagaagtgtgccaccgtgtcctaaatatgagaaataaccatagctgtgtgtggtggcacacactgattccctgcactcaggaggcagagactgatggatctctggatctttgtgagtttgaggccagccccgtctacagagtgagttccaggacaaccagaactacatagtgagatcctgtctcaaaaaaaaaaacagaaaatgagtaataatctgaagtaagtcgtgaaaaatcagtactcatgttgtgcccaagtcacaaagacccccagagaccaccaggaagacagacccaccaaactacaaagcaaggttttattgattgttcatccaaccatgacaggcaccccgtctggctagccaactcagcagcctccagagggagcaagtttcctgtctactgctaagttttaaagacaaaagtcagccgggcgttggtggctcacgcctttaatcccagcacttgggaggcagaggcagggggatctctatgagtttgagaacagcctggtctacaagaggtagtttcaggaaagcctccaaagccacagagaaaccctgtctccaaaaaaaaaaaaaaaagacaaaagtcacaggattacatcagtaggtatggtttggtttctgattggttgacatttgggaacaatcaggagaatttctcaaagtcatattttggcatgaaatacctgtgtaccaattattctcattggtcagtgctgagagggaacattctgtggtttctatggctttgtcttgttacttgcaggtggcctgttgtacacagatagcaatagttttcagaactgtatcctggaaactacaggggaggttttggtctcccctggagtttcttttgtggccaaacagttcccaggaaccaagtatctaggaggctggggagggggggtctggagtttctttgtgttcagttttagccctaggctctgggaggccagaggatctgggtttccccttgtgtcagaggcctacatgtcctttctgtagcctgtcatggctgctgaagcaggggctgagtgagggtctgatcccttcattcctagaagtgaagcctttgagtttagtttacacctttcaagtcacacttgtgactgtttctcaactggatacaacctagactctcctaggaaaagcgtctcagtgagggactatctatataattaccagagacaatgagggccattctacagtggtaagttggaagctaaaacaactgtatacaaatacacacctaacaacagaatccaaaataaagtaagaagtgacagatgaggctggggacagtggccaagaggtactgagcccgtctagcacgtgcaattcacaaggtctaatactcagggctgaaaaaagaagcaacagagctggagaaacacagaacaacttgagatttcaatgccctaatattgataatggacagaagaggtgtgggaaacactgtgaagcaacttgacccgactgatggatctacaggccactgagctcaacgggagggtgcactcacctcagatgcacagtgggaaaagtggggccaccccatctgaaccttggaacaagggatgaaagggaagcccttagtatagtctcaatgtctatgttcctataaacacatcacttagagggagcaaagggtgacagtattaaaatagggtctttgatgcccaaggtgtggtggcacacacctgtattcccagtatttggagtcatgggatacacgacaagtttgatgccagtttgagctccatagtgggtccttgcctctaaaaaccagaaacaagattggtcgtttggttgtgtgtttaatttttgcagttccttatatttcctagatattaacccccatcttaagtagatagtttgcaaaaattaaaaaaaaaaaacaaagaaaaagaagaaacaaatggccacaacaacaaaaatgtgggttgagctgggcagtggtggtgctcacacacccttaatcccagtgcttgggaggcagaggcaggcggatctatatgagtttgagaccagcctcctccaaagccacagagaaaccctgtctcgaaaaaccaaaacaaaaccaaaaaataaaaaataaaatgtgggttggtattttgtctgtgcaccatgagcatgcagtgtcaaaagaggccggaagaaggcgctggataccctagaaggggaatcatacacaattgtgagcagccatgtgggtgctgggaattgaatccaggtcctctgaaagagtagccaatgctcttaactgcttagccgtctctgcagcctcaccttaaagtgttcaacatccttagccattaaggaaatgcaaattaaaactactttgaaatttccatgtctccccagtcagagtggctatcattaagaaaacattaagagaagtagttcagcacataaaagtgcttgctgccatggcagatgaactaaatccagtccctactgtcccatggtggaaggaagaagcgactcccacagattgtcctcagactggcacaatgcccacgtgggaacacaaacacaatttaaaatgtaataaattaaaaaaaaaaagtaacaagaaatgctggcaaggatgtgggcaaagaggaacccttatttaatgctggtaggagtgtaaatgggtacagcctccgtggaagtcagaatggagatttatcaaaaagctaaaaagtgctggcaagacggctcagtgggtaaggccctcgctgcacaagcctgatgactgagacccagatgaaggtggaaagggagaactgactccacagagatgtcttctgacctccacaggggaaaggaggagaggggagggaaggggagggaagaagaggggaggggaggggaggaaaattctgctttggacctaagcatggcagcccacagctgtaatcccagcattcaagaggctacaccaggaagatctaaggttccaggccatcgtgggctgcataatgagaccctggctccaacaataaaaagtaaaaagaggacagaatgacgaatctcaattaatacaaatgatttttctgaacatggtagcagacacatttaatcccagcactcaggaggcagaagcagaagatcttcatgagttcaaggccagcctgtccacatagtgagttccaggccaccaaaactaccacatctcaaaataaaacaaaatcaagaggacagatgacttgatgaaaccctaaattgcattggtagaatttgacccccaaacccattcaaccataactgaaactaccaagagtgaggaagcagctcagcggtttggtaccagtctccatgtgtaaggctctggcctcggtgctccagcactgcccctcaaaaatcattagacctaatcattttttacaatacagcgtatttcacattttaaacatatattttattttacattgtgtgtgtgtgtgtgtgtgtgtgcgcgcgctcgcacacacacgtgcgtgctcgtgcgtacatgtgtcttttggggggtgtatacagagtacaggtacctgcagaggccagaagtctaagagacccctggagctggacctgatgtggatctgaagagctgtgctggctcttagtggttcagccatgtctgaaggccctgtactgttttttgaacattcaggactctggctaagaccttccattcaacagagctgagagaatgccaccagtctacagattaatccaggtcagggaactacagccatgattcatgtacctcccactgccagtttgtataagctttatcagaacacagccatattcatttctacaccgtctattgctgttttcatctacagtggcaaagttgaagagttgaagataagaggccagaacatttggagaatgctgctcctgaatccgtaatgtagccagctggaattcactacatactgcatccttcaccttcactcctctgccccgcagcctgtgtcctggccccctccttaccaccgtcacatgctggacaagctctgtgaagttagggctctcacggtagctggccagaacttcagactccacacgtctcccagccacttccagaacaacctggggcctttccacctcaaacaggtgtatacgacccaggcctcgaagaccccagaacagcacctaagtttgggaaaggagagagattcaagggctggaagctgacacggtgccacctggttgggggaagggaaaaggcttgttacctcaatacggaactccctgagcacagggcgtacgttaggaggcaggctcaggtgtccagtgatgggctgaaccagagatgccagatcctggggctccacatcactaggcactgtgggctacaagaagaaataaattagaattcatgccacaacacagaaagcctaggcttggagatggaccataggtttctgtggtggtttgaaagacaatggtccctaatgggaggtgtggccttgttgaagtaggtgtggccttattggaggaagtgtgtcgctgtgggggtgggcattgaggtctcctatgctcaagctacacccagtgaaacagttcacttcctgttgcctgtgagacaagatgtaaggactctcggcaccatggtagcctgcatgccaccatgtcccatcatggtgataatggactaaatctctgaaactctaaggcacccattaaatgttttcatttataagaaatgaaataatattgtctcttcacaacaataaaaagcctgactaagacagtctctgtgaagtacaaatgcaggggagccagacaaggctgagtgtataggaaagattttccagaaagcagatgggtgtgtacagaaagccgtgggggagcccgaggcattcgcaataggtaaactcaggatgaacagtagtctgggttctctagggtagaattctggcaagatgaaccttagatatatccatctgtaatcctgggtgtgcaatgaagtcaccccaagataaccctgcagccagcattctcttgggtaagtgactagacagttatccttggggcaccctgagtctacacagcctgatgaataagaatggatacaacttgctagtcaggccagagaattctaacctcgaggtggcctctgtagtccagctcaatgagttcaaaggtagcaatgacttctccagcagcctgtgatcccttcctcagggggaagaactgcagctctgggcgctgatatgggtcttctatcagctttacccttggggctgcaagtgccctgcccaggaacacagcagggccctgtaggaggcaaagcagtgaggaaataaagatgatataactggttgtggtggctacatctttaatcccagcatttaggaaacagagatgataggttctatgatgagttccaggccagccaggactacacagtaagaccctgtctcaaagataaatgtgggaagataaaaatgctcagaagctaaggggagcattcaagggaagaggaggctggagaggggatggagggagggacacacttacaaacttattgtggtcaaagacgttgatgaccactagcggaggctcctcctgcaaatgctcgcgcctgccatccacaatcagctgctcaaacaccaagagttcatcccacagggggctcagtgtctgctccaagaccttggggaccatgcagaaaaaggggcaaaagcagatcagaagtggactccctacacataccagtgagcagtcaaagagattctctgtttgtcacccaaaggcaagggtatccagctctggtgtctccctatggccatctgccattctcatatcctcgctctaaagtcaaccccaggaaactggttttctgttctccatcactgagtcaggccagggtgttatctagtggcctgtgctgaaaacccaaagtgggaagagaaactcagggcttgtacaagagtgccccttgtcccctgctcccctctgcccatagccaagcttggccctcacccgtgtggtctggcactgggtagagatgaggacatgtgcaaacgggtctgagaggccactgtcatctgctgccaacacaccgcgggcctggtacagatgagcccgcagctggaaatagctgaagtctgacatgaatggaaggaaggagccatgcttgctcaggagaccactggagctctcctactcatgaacccccacctagggcaaacagcaaggcggctgaccccctggccctatactcaccgtcccggtataggctgtgaggcagtccagccgagggttcaggcagaagatctgggggcagctcggaggtgcaggccttggcttgcttggccagccccagccacaggaagagctccagcttggcacagacctccccgggggctgccccaggtgcctgtgtgggaaggaggcatgttggccaccctaaagcatgccccaaatctctctgctaaatggaacccaagctcccagtacaggaggcatgccctctgttcccacttctgcgtctctctccatgccctccatcccgccccacacctcacatgaccctgcttcccatccccacagttttaactgcagattataatctggactctcccttgtcccttctagcctcaacacatttatactctatcctttgtgccaagggtcacagcttctcactgttaaaaacctgttttagtgtcttttccagacacaattcacctggaaaatctctgtctgtaatccaccagttctgcttgccagaatggtcaccctccttcctcattaccctgtctgtgtcaaagggccagcgctggcccagggcacacaagtttgctgttcagctgacctggacaaagctataacctccttttggctttttggatggttaaaaacagccagagaggttcctggttagaagccacagaccatcacccctgatgtcctgccctgtgctatgaaccccactctcaccagcgcctccaccccaggcccatctcactgtgagtagaagactctggatcttcccacagtctcggcctcgttcctcctccaccacagagaacagcacatcctgggcagggacgcgggcataggccacccggcgctggccgctgatcatccagaccagcacatcagggaagggtggctgcggctgcaagtggaggacaggtcacctggggagtctggagctaatgctacccgatcctaaagctgaatgggtaatttaaatgccccgacttttctgaacctctggtcctgtggccacctgctccctgacctctcctcctattgcaccatagggcacctcagactcgaagaccacctagaccacctagtctccacactgcattctgccccaatcactttttttttttttcagacagggtttctctgtgtagctctggagcctatcctggcactcgctctggagaccaggctggcctcgaactcacagagatccacctgcctctgcctcccaagtgatgggatgaaaggcgtgcgccaccaacgtccggagcccttgtcacttttaaatctacaattcaatggtgttaagtgcattcacaggtgtactgacagccatgcacccccagaaatcttctcattttacaaaacagaaactcaaaaaacaacaacaaaaacccagaaactcaacacccactgagcacagctccgcatttccagctgagggcccagttcccaataaccacaaagaaagcaaagtaatacaacacttaaaaagaaagctaggaatggagccgggcggatcccagggatctgacgccctcttcccacagacaccaggcacgaccgaggggcaaaaatatacacacaggccaagaatttatacacataaactaaataaaccttaaaaaaacaaaacaaaacaaaaacgacaacactagattgaatgagtatttgtgctatgaaatgtcatttgacaaaggaagactttcattacaaattttaaagacaggataggggtatgagtcagtggtaaaacatgcttatcatagggcaaagaagaaagggagagagggagggagagggagggagggaggggggagggagagaatggaaagaagattaatttcactctaagattccacttagtgaattcctctcctcttcctccttccagtgccattttccaccaggcctcccagttctgggcatttgcaagtgtcgctcctctcacacaccaaactgcaactatcaaatgtgcttgaaattcctgctgctgcttaaccagctatgccaagatagctagactgtcagcctccactggatgcctgttatggcacagacccctcccccaaggttgtttgaagaattacactagaactcaagcagatgcttcgtgcagaaagtgtcccaagcacaagctctcctcatacaccccagccacccacggtactaaacagaggaagccttgcccaaggcaagccagtcggctgtcctttccagcagctcttgagtcatctctggatccccgctgacccctcccttcctcactcttgacttccacatgaagcaggcggcacaatggcgccatccagaggacaactgttgcagatgccccaaggtctctagaatgatccagaacttaggtggggggaaatatgtagcgtaagaaagcatggtgggcaaggcatcacctccttagccaggaaatgcagctttgccaggagcttcttggccagtgccaccttcctttgcatgttgctctgcctcaggccccgtaaaagctgcaatccttgctttgccatcagattcttgggggcgggggagaggcagggagaacataagtagaaggactcagctaggtgccctccctcctcccagtccccagcctgtaccaggctgtgtgacagtagtttccctcgacatcgatccagggtgttgggtcgtgtcatcgtcctgcgctcagcaccaaggcaaaactgtctgcagagaagagagaagccacggtgagatcaggacctcagaaacacttccctcagaaggcctcctattcctgatcctgacagcccttcttcagagagcctcatgcccaaatgcaccaagcacaacctggtctttgagccctgcagtcaccaatatttaacatctcctgccctggctacttcagttatggcccaacagcctgactaacctctgcatgctatttagaaatgtcctgcctgtcctgtcagcaccacccaaggcctacagcaccaggcccttcgtgtttactttctgggagagtcctatacccatactaaatcaaagaagaatgcctgctttagtctccaccagcctaactaaaagatagctggacttccaggtgaaatggtagatgacacctttaatcccagcacgcaggaggcagaggcaggtggatctctgttagttctaggccaacctggtctattagagcgagttccaggacagccagggctaaactgtagggtaaaaagggccagtgaaagaaaacccaggccctaagacctaagccaaagaaacacaccctgcccctcaccaattcaataattgaaatccaaccaatccctgaacactaaaccaacaaatccctgagtatgaaatccaaccaatctctgatcttgttccaaactcaggaattaagatcctaccaatccccaccctgaaaatctctaccttggaaagccccacccttaagaaatcctgtataagctctgtactaactcagtttggggatgccctttttcttggcagaggcagcctctctcctggattcttccctcccaataaatctcttgagtgaggtttgttgtaacaacgttttctttccctggagcaaagcagagatgtacccgcccttgaagccagagccgagcagaactgttacatttctgtagtaaaatttccttagcagagcagagctgtaacaactttcattggggcagagcagagctgtaacaactttcactggggcagaacagagctttaacactgtggctggggaaactttcccttgctggaagaataattgttacactctggggaagctgagcagggctgtaacatttctctggagcagagtggaatagagctgtgacaacccaactggggaaatcctcctctgctaaagcagagttgttatactgacatgagggaaacatttcctggagcaaggattgtaacatttttctagggaaaccgccctccaccgcaacagagctgtaggtattccttggcttctgactgccaggatacctttcccttctgagcagtaacgcttacatcacagagaccttgtcttggggagggagaggaatccaatatcaggatggatatatgagtgagcaacagagcacacgcatagcatgtgtgatgctgagtttaatgtccagcaccacatgcatgtaacatgtatgtactggcaccctgcatctaaccacttctcccatcttcctctaggatcacccaggtgaaatgaccattgtgtctcacccaggatcactgcagtcacctcctcactgcactgtttgctgttctaaccctcatgccatagaacattctcaaaagcacccagaatgctgtcaacacgtttccatctattttgttctactcatctaaagctaaatcacaaaactctaaaaatggccaaaaggttctgcacatctggtccattatctccatcctcattaaatatgccttgtcccatgaaggacaactatgtgtcacactggcttctttgctcctccataaattatgtagagagcacgaagtctttgtgcacacagataagcaccaaggaatgtaggaaaagctaaatgcatagcttaactcttgagtggaatgaggtgcttagctgtagtttacagcctgatgaccctttgctgtctggtgagccaggctttgttcacatctcctagaatttgttttacttatcccagaccctccccctcaacaacagcaacaacaacaacataccttgagcattgcttctaagacataaaaccaccctcatgggtgatgtcacttgtatttttcaacagcctaagtgacttctatgccatcgtaggactaggccaatcctgacactcacaggcatgtttatctagtcagtcacagcctagatcctaaatcttggggcactatctctgagacaacagtacccatatttatgaaagaggccagatgtactttgtaaagagtctcaatacaaacctctctctctctctctttctgtgtgtgtgtgtgtgtgtgtgtgtgtgtgtgtgttcaagacagtttctctgtgtagccctggctgccctggaattagctctgaacagcagactaattttgaactttcagagatctcctgtttctacctcccaggtgctgggactaaaggcatatacataccaccactgcccagcttcgtgtcttaaatttgttatgcacttgggactgaattaattgttatcagaaaaccttttcacccaaaattatattgtgcttaaatatgactcaagtaaatgatctggtatcagcaccaatcatggattgtttccctgcctgctgtaagcctacagggacactccataaaattataccatacccattacccctcatagctacacagtgataccctatcttaaagggagggggcagcaaaaggagtgagcaagccacacagtagaaagctagggatgttatagaagtcaacaacagtaaggaatgagctctactgtgtctccaaaagatatgggtggagaagtgagcatccacaacccagggcttacagcttctggcgctgggatattctcattcttgttaagtactctatcacttaaaatgttattttttaattaaaaatatttttatttatttattaattttttcccctgagacaaggactcactatctctgtctgtcctggaactcattatgtagattggccttaaatacacagagatccacctgtctgtctctgccttcaaatgtagagattagtggcatgtgccaccgtgttcagcagccccctacttttaaaataaaaataatttttagggctttttgtgtttttttttttttttttgagacagggtttctctgtgtaacagctctggctatcctgtaacttgctttgtaaaccaggctggcattgaactcagagatctgcttgcctctgcctcccaagtgctgggattaaaggtatgcaccaccacttcccagcttagattgtataaatttatctgggaagacccaccagaactgtgggtggcaccatctcaagggctgaggttctgggttgaataaaatggagagggtgagctaagccccaagcactcctccctccctgcttcatggctgcagacacagtgtggtcagctgtgtgtcctgctcttgctgcaaagctttccctgctacaatggactgtaacccctaaaactgtaagccaacataaactcttccttaagtcattttggagagtgatctttcatagcaatgaggaaagtaacagatactgggtctgaaatcttgaagttcatctgtgactccacacatttttctccttttctacatttagccatactgaggtgacatctccaagtgtgaatccccagccccccccacccttttttgagacacgatctcttgtatgtcacactggtctcaagctgacgctgaccttgaacttctgatccccctgcctctacctcccaagtgctggggttataaatatgcaccgccacacctggtttctgcagtgctagggattgaaccagggctctgcaagcactcagtgctaggcaagcactctgccaagtcagttcatccacagctgtttaatccgtttacctcgtctccatcgcgtggttcagctctctgtcccctaaactactacaaagccttctttagtaaccctgtcttctctcacaccatctctctgccactcatcctttctaaagttataaagagaatttcaagaccctcagtggctctcccatcacccagaaaagaaaccatggtcattgcaatgacatggcaagtgtcacgagtgtttgctgaatagagagaaaacacttgagaaagtgtcagaaagggactcaagcgctagagcatgttatcaaattcatggcagtgaggtgaaagacagaaaccaccaggatgtgttcctgtgattagagcaacaactggtaactgggaaaggactagctaagggtgcagcagagacagatgatggcagagctagttatgcaggaggtgacgggagattgaatcagtatcccagacctgcaaccggggaagtagcttcctccctggatcaggaagaagggccaacaaatggatgtagaagctgaccaggtacaggctcgggggggggggcagggttgtcctttctcaggaaataggagagaagccttataagcctctagagccaaacaccccgtgatctatagcaagcaccattgatatggacacttcccattctctttcttctgtagatgctggacaaataatgcagcttgaaatcacccttgatttcaacagccgccatgactctcagctcacctgctcccagccaccagctcttccagagtctgcttgagccgtgtgcaggcacccaaccccgacctgcgctgaatcttctcaacctcctgcaggccctggtcctgtgtgggctccagcagaagtcagtcttgagggtctggggctcaccccaccccgccccacccattcatacccctggttctgcttctctagcccccttccggcttcactccgtctatcattgtacccatcccttcccaagctcccacaactttgttcccctcaggctgccacccatttcttggccctacaccaacaagacatgagctccaccccttagtgtctagtttggagcacctttccaaagctgagtcccttgtgtcctgtgtctgggcccttcccttcaggggtcaccttgctctcaccagcctctcagccactttgtacacactgttgctgctatgcaggcgccaagtataatcctcccagcggctccacacatgcaggcagggtttttggtgcagcagaggcaagcagaggtatggcctgggccagagagaagggagggggctgggggcatcccgagtgcttgaagacctatctataccctcctacaagtcacgcccgatcacttacccattgccatctacaggctcgggccactgatccggtgtccccagcaactcttcctcttcctgccctgcccctctgtcctcagatcccaggagaggccgagattcgctctctagtgtgctgccttcggctccctcatcagcccttgacctttggcccaattgctcctctcggcggcctgtgtgacctgcccccagaacatcaaggatcagagcctcaggctgagggtcctatgcatccctctgcagcctctcccccagtaggagcagagcccaccactctccctgaaggtgaacctccctccagtgcctaaagctgaaacaagaaggcaaacccatgaccttcagtgcttatttaggccacacaccaatggaaatctccaagctgataggctgcttggccagcgaaggatcaatcatggtagcctcaaagaccactgcaaaaagcaggaaatcttcgcagggtgccagggcattctaggaaagagagcaaggtcagctggggtcagctcccatcctccccaggagcagtttgctctatgcttggtcacaatgcccacagaaagatatcagctaaggtccagggggctctgtgagtgtcttacctccctcttggcccctggtagcttccctatacattggtccagaggacagattctctctggtccacgccctctatatataccatgtctgtgtacatcagaacacgtgtgcacatacactgaattctcaacccaagtccccaaattgataacagcatcatgatttctaaagcttggaaagggatttacaagccctagagccgagggtcaccaccaccagccccacctccggcagaggcagcaactcctccacctccacctccattgcgctaggaatctcaggtgcgtccccgctggcactggcatccacaggcttcggaacgccagccgtggtttgacgctgcttggttttcttctttttcttcccagtgagtcgggacaatctggacccctgtgtgctctggggggatgtaggttcaactctgccttccaacacctccatggacacagctaccagaattcggccccggaaccaaatgccttctccaacaccttcattgagactttgaagaccatcccggaacctgccactggggagcgagccatagaggggcacccaggctggaccaaaagtggggttaaaccccgctatgggggacaagaacagggtttggaggagagcacagggtaaatggagactgctctggactgtacacctttgtatcctccaggtgttggggggagggaaagagaaggctgagttctggaagggaacaggtctgtgacaaacagtagcagacagaggacctctctagacttcagaggggagctgagagtggggtagaagtactggtgtggtaattggcggagagggtgtggatactgaaaccactgacttcagagaggtcattttgcagcaaggcttgactggaacagtgggggtggggggtgggggtgggggtcatggttggaagacagagccttgtaggggacagtgtaagccacgcctgctagaagctggctacaggtgtgcctgaccatgcctgtcagggcgtggccaaggtgaggtcaggatgacacgtgatagggttttaagtggctgcaaggcacatgggagccccttctctctggcctccctgccttgctgcccctggcacgctctggcttgcgtttggctggtgtttctctaaataaagatatcttagccttacagacaccagatcatctcaatagagcctggcttagaacagttcgttttgtggggtggatggtcctcccttgatcacctgtgttttaaggatgttttgttcnnnnnnnnnnnnnnnnnnnnnnnnnnnnnnnnnnnnnnnnnnnnnnnnnttacactcacctgtgcgaccggagttcgaaatctgcctcaggtccagcacatgtgtggcgagtgccacatccaggagcggtgcatcttcacgcagctgcaggcgaaggccacgtgttagcggtgggaagagttccacaaagctcaactgctcgttccactcgggctccgtctcctcttcacacacagaagtctcaccctgaaggccaagtcaggaggagggagttagtgtgggtcccaaaggatagttctgcaggttatagtgcttgatatcaagtgcgatgacctgagtttgatccccagatcctatactgctgtccctcctgcagggtgtcctctgacctccacacatgtgccatggcactcagggcacccacacacatacacaaaataaataataaaggctggagggctggagagatggctcagaggttaagagcactgactgctcttccagaggtcctgagttcaattcccagcaaccacatggtggcttacaaccatctgttatgagatctggtgccctcttctggtgtgcagatatatatggaagcagaatgttgtatacataataaataaataaaaataaaaaaataataaaggctggagagagcgctctgggattaaagttagagcaagtactcttccagggagtgagtttgcttcccagtccacacagggtgcatcacaccaccaccctgactccagctgcagggggtctgactccctcttcaggcctccatgggcacttgtactcatgtgcacagaataccacagatattccacatacacacaattaagaataatagcagccaggcattgtgacacatgcctaatcctaccaagggaatctgagttccaggcctggtagggctacatagcaaaaccttatcccaaaataagatatctttaataaataaataaaattttaaaaggttcgagctgtggcatagggggataagcgtgacttacctgctgccccaggaagctcaccctcacatagggatccaggaggacgtgttggtcatgcaaggcacgggccagactgcctagcagccccgtgcgcactgtaggaagaccctctgcacggtacacacgtacacgcaggcgtgcccacggtctctcagcctgcaccccacgtggcaggagtagattcctaggaacatccctcactgaggagtaaagctagagcctgagcccctctgcttctctgacccccccccccaggccatgcctcctccaatcctccactcccgtgtcactcccgggtcactccagctcacttctcgatgtctgaactggtcccagggattggagcgggcagtggaaggggaagatccccgcgtgccctcacagacaaggtgatcttgacaaagcccttggtcccagatcgggtgtcacagggatcatgtaggggagcccacttttggtggaaatgcccatctaaggatggaaaggagtgagaggtgcctaaggaatacaccgagttgtttcaggacattggacagtggctggggttctgggcaaagcattctatctggcatagagagaagagcctaagcacaagaaaggtcagccatcacaagagatgaccttctcagaagttagtgcactggggacagcacaggtgagtgaccagagctcagtttctggagtctttgttcatgtaaatgagtttcaatgagagaggggggttcaatacctggctggtccaaggccatgcccagatccatcctgaaggtgcctaccctggtggccatgaatgggagagtctgcgagtggaaaacctggggagagaagggttagtcctggtgctttggtacctttctccctgcccccttgtaagtctctctatagccctggcagggctttgaactcatggcactcttgctgcctcagccacccaaagactcagctgggcatcgcccctttctcaaaataatcctctttctcactcacagtgatctctatcagcaactcttggaggtgaagccgagtcttgtgaaattcgaacaagaagtactgggttgagtgagatgagaaagggaaagagcgttaggtgtgaaagatgcattcagcttgccccgcaatctcttcactcataaaaccagaattgttgcacccaggcctgccctctccagggacagggtgtctctgatcacccccattctctcaagcccaccctattccttggtggtgctcacctcattgtagaaggggcaattggttccacgctgtgttgcagtcacacgacgctgatcccccacacgaacagccacatagggattaatattgacgcccaccagtttctgggcctcaagaatggtgacccccacctaggtaaggaatgcaaaagagggaggaaagagagtgagacctgcctggatgaggggagaaacctgtgagattccatgaggattagagcatggcccaagagtcatacctggaagtcctgggctctgcacacctggaagggatccctacggggcaggcccagggtgcggctgtagagaagcatagggtcaacttcacgtccccttcctcagccgcccacacatacagttgcctggcgctgggataaggactccgcaccatgaacttttggagtttaagtcctttcagattgcattgccctaccttcatctcaggcctacatccagaatttgactcattcttggagcgccaaaaccatttgtttgctcagcaaaggttgattgagacctgctatgtgccagcactgttctaagagctgtaacactgacatgaacaatagacaaaacctaccctaatcaagtctctttattaactagtgtgagccactacaactgagtttgaacacgatggtgtctgtgcctataagtgaatgactcttgatgccagacaatccacctctcccctacaccctggtgtggatgggtgtggccttatgtatgaggaagactgactcagtgacagggtgtgagagcaggtgtatgggaacacgttaccttttgagggggctgaacaccaccccagaaatctccacgtcaggctcgtcctccagctccagctccagctccagctcgttctcttcatcatcctgtgtccctaggcttcgagctagcctgcggcccagagccactgcctgacgctccagccgggcctccccaggcctaatggaaaagaccctcagagatcatctgttgctgggcatcccttgtttttgcttattttatgattgacctttgatttcagattgatcccgctattctgggactaattctttttttgttttgttttgttttgttttttaagtcaggtaatagccctggctgtcctagaactccctttgaaggccaggctggccttgaactcacagatctgcctgcctttgccttccaagtgctgggaataaaggcgtgtgccaccacacctggctttggactcttaatcctgagaccattctaacttcagaaccttgtcctgctgcaaggattgacctctgaccttataattcattcatcccattctcagactctgggactaactccatgtcactggttctcaacctcaaaactgaccccgtggctctcaatcactccctcatacttactccatctcctggaagcccacattggggatgatcagctctgagctgggagggaaaatagagaggtaagacccgctgagaatgcactcagagtcacagcacccagcacacccagtaaggagacgaatgctccctttctctctttgggctgagtttcatctgcggacaccagaccttgcttaggattattacctgtctcgaatgggtgtcccaaagtcctcctctacccaggttccagcagctccctcagggggctgatactttaagtcaagctccacctggatctgaaacaagatacgatgcccataggtccctcaaaccgacatggggctaggagagtgtgacggggaatgttcttctgtgcagacgtttcttttattggttaatgaataaaaccatgatttgccaaggcaggatgataggtaggattgggagacaaggaggattctgggaagtataggcagagaggagttgttatgtgatcccggaagtgacatggctgggcagaaactgcacatcagccgggacaaataggaaatcgttctcttctctgctgaaatgctgaacagtcgagatgtaggtcgccagaggagtaagaggtccctggacctttctctggtcaaataagaccacgtggagatacttagatttttagaaatgggttaatgattaagaataagaaaacttagccaaaggccaacagctttataactatatagtgtctgtgtgcttttggggggacagagaagggcagtgggaccaaatgggccaagaatctgacattacaagagtatctggacaatgcattacacttcgtctgcaaatagagaccctttggactgtgtatgtagtaacatgttcctctctcattatcaatgttagcactcacaatcctctgcatttgctagctgccagaagaggtaaagtcagctgtctttaatgacgtgacccctggggggtaaactacactccaaggcaggccccacttccaagagcagtcaggcaacataaactgaactattgtcagggggtggaaaagaaaaaagaaaactcacagttgggtgggaagggaggtgagggtggaaagaagacacatgggaagagttgggaatgaatatgatcaaaatatattctattaagttcttatggaattaacaaagaatattatttttaaaatagtcacagccttcttgagaactacaggcaatgatctggggagacggcctagtaggttaaagatgcttgttggcaatcctgacaacctgagtttgatgcccagaacctacacagtggaggaagagaaccgactcctagaaggtgtctaacttctggacatatgcctactcacacataagaaaataaatgtttggctgggcaatggtggcgcacacctttaatcccagcactcaggaggcagaggcaggcggatctctgagttcagaggccagcctggtctacagagtgagttctaggacagccagggatgcacagagaaaccctgtcttgaaaaaacaaaataatgaactaaaataaatacatgtttaaggggctagagagatgactcatctgttaagagcactggctgctcttccagaggacttgggttcaatacccagtacccacatagtgactcataagcatctataatgggatctgattccctcttctggcatgcaggtgtacatgcagacgcccagcactagggaggcagaggcaggcagatctctgtgagttcgagactagcctggtctacaggagctagttccaggacagcctccaaaagccacagggaaaccctgtctcgaaaaagaaaattatttatttattatgtatacagtcttctgcctgcatgccagcagagggtaccagatctcattcaaggtggttgtgagccaccatgtagttgctgggaattgaactcaggacctctgtaggaagagtcagtgctcttaaccgttgagccatctctccagcccttaaaattatttttgagacagggttttagtgtagcctggaagtcactaaaccaagccagcctggaacacagagagatccacctgcctctgccaggattaaaggtgtgtacccccgtgctccgctataaataaaaaggaaatcaatgaaaagaacttaaggctggagatccagcccagttggtacagtgcttgtctagcattcagaaaggcttgggtttgggttcagcagtactgaaaacaaacaaatctaagcttggaaaacacaaaacaaacagcaacaaaactcagcttcaatgtgcaagttgcctcttgagctgattccttctctggtccctgacaacttctccagctccatctcattataggtttctgtcctgctcagcaccccaacaatgctccatcagcaccctgggatttcacttattcaggatcctctatctcaacattctccttcctacctagctaacacctataaccttccattctgagctcaagcaccatttccccaggggaactcttctgacttcctcatctaggtcagactggttatccacgctcatagactcttaccagccctgcagcattcaccagcagcaagactacctctacctgtgtggatgcttgcttagtgttgggcccccttggttcagctagtgagcttcaataaagcaaatctttatttggttttgcttatcactgaatccctattgctcaatatcatccttgaacttaaccaatgattgaatggaaaaaaaaaaaaaaaagtctgattctccattacgtaaatggggaaacagcttggagatgctgaactctactaggttctccagggggaacggagatttgaagccaggtccacctcttttaaaggtgtgcaaccttccaggaaaatcctaccaggttcatcattgtcacctgtaagaaaagaagtgagcctaccccagatccaaggagcaatggtacactcaccacacccccttgtgactcagaaatagcctgattctggcctgtgtaggactcaggcaggggctgtaagaaagggagcctaagttggggccgggtgcttgttgccactcctgtctggctcaacttttcccctcagttaaatggaaccatctgtttggaggaagtctcagacttgctgacagttggctggtggcacttaccggggacactcggagtttctcatccactagggcttccctcagcaccaagtgcccagaactctgtaactgctgcagggaaatcaccagggtccccagggacctagaagaaaggcatagagcagaagagtggggcaggtagttgacactaagccacttcctggcttcctccagttctactcacctggggctgaacacacggctacagttgaccacctgtacagtcagactctctccagccagtggagatccatagtggggccaacgaaacatctgaggagacaggaagacgctcgtaactggatgctaggctgaccctcacagagtctattcccaactgttcaaatgtgaggccacacctaagagtaatctcctaagcccagaacaaacccctccaacatggggttgacttcagtctagggctcatctgggactccttgccaatcaagcactaatcccactagttttgagactggggtcttaaaccagggctaacgtctcaaacctgagacgcacaccatttctggagaccataccttccaggcccaggaatgagcccttctgccccagcatggaccccaaaaggaaaatactgacttcttttcagctgggaaccagctatactgacctcaccaacatctgcttctcggccacaatgaattttccttgttttctgggtaaagcctgctcaaaaatgaagcttttatcaggccctccacacacacaaatcatttacctccccaacccatgacccactgccgacttccccactcaaacttaaaggtgggagataaggaaacaagtagaagccagggagaagggagacgggttatagagctggcaaggatttaagttggagggaatgaagaatccagaaacccccagctctaaaagtccccatccatgcaaatctcaccacggaagcagagcttcacttgtcggtcatggatgcctggcagctctgttaggcgtctcacacacacggtcagagccatggcgcagtgctgtggctcagtctgcctgcttgcccttctgcccaccagtgttgtccatgactcactggactcacccagcaggttcagcaatcccttccctctagtcaaacacacagggagcaggcctggaggtcatgggtgggaaggcctgaggcctgagaggtggggtcagcccagagctcttcccataccgtcggcaggatggcaagaagggcaagaagcttcagcctgtatctcatctttgtgggatgggagctgggatcgggtacagatagagaacatctcaggctggtccttgctagcccgtgaggcctcaagccttcatgttctttctatcgctgtggtagaacaccatgaccaaaagcaagtcttggaaagggcttatttcactcacgcttgcatatcaaacagctggaactcaagcatgcagaggctatggagaagttccgcttactggcttgctcatcatggcttactcagtctgccttttagtttgtttgctttctaatagaatcgaggactgccagcccagaaatgtccccatccacaataagctgggccctccaccatcaataagttaagaaaatgcccaacaggcttgcctaaagcccgctctgacagacattttctcaattgaggtttcttcctctcagatgactttagcttgtgtcaagttgacataaaactagccagaacaattgaccctttgtccacttgacacaccaataaaacactatttaacaataacctttccatttttgttcattcacaatctctcatattaataaataaaacaatataaaacatactgagctgggcagtggtggtgaatgcctgtaatcccagcactcgggaggtagaggcaggtggctctctgtgagtttgaggccaacctggtctacaaagctacacagagaaaccctgccccccccaaaaaaaagaacattggaaacttagaattctcacaggtttttatttattgggggcagggatttttgagacagggtttctctgtgtagctctggttgtcgtggaactcactctgtagaccaacttggcctcaaactgggagatctgcctgcctctgcctcccaagggctgggattaaaggctatgctaccactgcctggctaaaagcctcacaagctcacagtctttacaaactcaaacactttaaaaatgcaggcttttagaatacaagattaactcaaaaaaatcagtagccctcctatatacaaatgataaacagagtgagaaagaaatcagagaaacatcaccctttacaatagccacaaataacaaaatattttggggtaactctagtcaaacaagtgaaagacctatttgacaagaacttcaagcctttaaagaaagaaattaaagaagatatcagaaaatggaaagatcttccatgctcttggataggtaggatcaacatagtcaaaaatggcaatcttgccaaaagcaatcaacagattcaatgcaatccccatcaaaatcccagcacaatttttcacagacctggaaagaataatacttaacttcatatggaaaaacaaaaaaaccaggatagccaaaataatcctgtacaataaaggataatctggggacatcaccatccctgacttcaagctgtattatagagcaatggtaatgaaaatagcttggtataggcataaaaacagacaggtggaccaatgtccaaagaccccgatatcaatccacacacctataaacacctaatttttgacaaagacgctaaaaatacaaaatggaaaaaagaaaacatattttacaaatgatcctggtataactggctgtcaacatgtagaagaatgcaaatagatccatatctatcactaggcacaaaacaagtccaaatggacccaagacctcaatataaatccatccacactgaacctcatagaagagaaagttgtgacgtctgtgccaggacaaagtccgagtattgggggaaagactggagatttatttaaaagccgaaatgtccggtcgcttgtgctatgtgcatctatccaactttattcatctcctttattccagggagagagcagccttatatacacttacagcacagttgaaatgcctcagatgtaagagcacgtggaggaagagctcgtgttttcctaggtgtagtggggtgaggccggggctgtaagccaggactagaacacaggatgcacctgtgattattggctgacaagcaactagagaccccgtgggggctgggacccaaaagaaagtgggaaatacacttgaaagcataggtacaggagatcacttcctaaatagaacaccagtagcacagacactgagagcaacaattaataaatggaaccccctgaaactgagaagcttctgtaaagcaaagaacgcagtcaacaagacaaaatggctccttacagaatgggaagagatcttcaccaaccccatatctgacagaaggctgatctccaaaatatacaaagaactcaagaaactagaaattgaactaccaaataatccaattaaaaatggggtccgtgttgggtgttgatggtgcatgcctttaatcccagcactcaggaggcagaggcagaaggatctctgtttgaggccagcctggactatagagcgagtaccaggataggctctccaaagctacactgagaaaccctgtcttggaaagaaatggggtacagataaacagaattctcaacagaacaatctcaaatggcagaaagacacttaaggaattgctcagcatccttagtcatcagggaaatgcaaatcaacaccactctgagattccatcttacactgatcagaatggctaagatcaaaaacacaatgacagcttaagctggagaggatgtggagaaaggagaacactcctccattgctggtgggagcgccaacttgtacagccactgtggaaatcagtatggtgatttctcagaaaattagggatcaacttacctcaaaaccctgcaataccactgttgggcatatacccaagggaggcacaaggacatttgctcaactatgttcataacaacattatttgtaatagcaagatcttggaaacaacctagatgtccagcctagacacaggggtatgggggtggagaggtgccttggtgctgcctcaatgagaagatgggacagacttagtagacttcctagtggaggccgtaccctctccaaggaacagatgggaggaaggggagaggggtgagcaggaggagaggaaggaggggaaaatgggattggaatgtaaaaattaaattaataaaaaaattagtcttaccaggccatgctggcacacacctttaaacctaacacttgggaagcagaagcaggtggatctctgtgagttcaaggccagcctggtcgacagagtcagttccagggcagccaaggctacacagagaaaccctgactcaaaaaacaaaaacaaaacaaaacaaacaaaaagacagtctctaaaaatctagcctctataaaacttcaaaatctctttaaaagttcacagtctctcaactgtgggctcctgtaaaataaattacaaacttcctcattccaagaaggtagaaccagggcacagtcacaatctgaaaaagcaaaatcagacttctgggactcactcacaatgttccgggtttcttctaatggtctgccacagaacacatagcttgtcttgtaggctcaggccagctctactacatacataactgctgctgtccttggtgactatcctatggactggcatctccagaatgctggagtttcttgctgcaagtaggttgcactttcaccaatagcctctcttaggccctcttcctgggaccgagcagaatttctcttcatgaccccttcagtcctggccttcaactgtccctttgtctgtaccttcaccgatgacctttcctggcctctcacagtgcccaagcctcagctgctcgctctccatggccccttcaagccttcaaaatcactacctgagagattcttacaagtaaccaagttcagctgccagcataaagtataacctaggcccctcctcaaacccttgcactgacctgaaacactttccagaagatttcccctctgagctgggcttttctcactaatctctcagttccagctgacctgcatcaattgtcagaggaaagcaatgttttcaccttagaggctttggtgtcttgttaatcagtcaattcttcagtaccagctgaccagacaccacagagtcttaattcaaaatatgcaatggctccaatagagtctttaagtgactctcaaacttccctctggaacttcataagccacgtctccatcatctgtatttctctcaaaatcttatcttccaagctcctacagaactgctcacccagctctgaacacccaatggcttttctagccccgtgtgccaaagttattccacaggcctccaaaaaagcatatgatcaggtctgtcacagaaaatccccagtgcctagtactgatttctttcttagttaggcttaactactgctgtaatgaaacaccttgaccaaaagcaacttgggaggaaagggtttatttggctttcatatcccgagtcacacagtccattgagggaaactaaggcaggaactcaagcaaggcaggaacttggaggcaggagctgatgcagagaccatggagaagggctgcttactgtcttgctcctcctgcctttttattttgttttattttaatagaatctaagactaccagcccaggggtgtcctcacccacaatgggctggtccccgctccatcagtcactaattaagaagacactctacaggtctgcctacagccagatcttatgtaggcaattctcagttaaggttatgagactgtgagaatatgacccttccaaatcaacctttaatcaagcagatacccacaggcttgcttacaggccaatctgattgggacattttctcaattgaggttccctcttctgagatggccctaatttgtgtcaggttgacataaatgaataaaaaatgtgtggcctctgtgtaagcctggctgtcctggaactcactatgtagatcaggctagccttgaactcagaactcctcctgttttaattttcaaaatgccatgaagagaagccattccatgcaacaggactcacatggcaggtttattagaagaggagagagaaggggcagaaaggggcagagagaggggcagagactggtccctggggacaagagtggagcgagagaaagggagagagggtgggagggcgagaaagatgggggtgaggggaagggaggagggaggggagttagaggggggggaggagtgagatgggcaggaccctttttaaaagagagcatagtgaattgcacaggtggtgctcttagtggctgcagctgagggtgtatcctgtcagatacctgaatactagcattcctcccttttattataaagaggtcaggcattaggaaggggtagcaggtgaggaaggaatgatgatgatgccatgttctcaagactacttcccgctgacctaaggggcattgtttatctttggggtacctgggaacactggggtgctgaccacgtgctggagcagctgcccatttcacttcactgtccaggctctgtggaactaccaggcatggcctggacctggcagaatgctgttcaaggtggatccaagtagactccctagggcctaaagcacctgacactttcctcccacaatgtcactggacgtgtttggtcatcttgcaccaccagccctgtggccaatagtcctgaaacaatagctgattaagaatgtccagtggcaggtgttggtggcacatgcctttaatctcagcactcaggaggcagaggcaggcggatctctttgagttcgaggccagcctggtctccagagcgagtgccaggatagataggctccaaagcttcacagagaaaccctgtctcaaaaaacaaaaaaacaaacaaacaaaaatgaaccccctctccccagtgttagtgctgcaagcactcaccacattgttgaattgatgagtggttgaatgtatccctagactacatagagtagttggactttgtgcctcttaaccagaagccataggtccttagcttaatgtactagaacttgagtgaagctgtaaatggagtctgggagtctgcaaaccttagaatcagactaaaaattaactatgtgtgcatttgtatataaatgccctacttagttgttaacatttactttcactactattttttaaagattttatttatttatatgtttacagtgttctggcatgtatacctacacactaggagaagacaccaaatctcatgacagatggttgtgagctaccatgtggttgctgggaattgaactcaggactctggaagagcagccagtgagcttaacctctgagccatccctccagccctacttttactattattgatgtgtacctgtgtgcatttgtgttcagatccctgggagctggagttgcaggcaattgtaaattgtctgatgtgaatcctgagaaccaaactctggtcctctggatgagcagcactcctcgctcctgagctatctctccagcctccgattagttttgaatttctaaattacatttgtttgcatattatttattttggagggtgtgtgtacatgttacagcatgcttgtggaggtcagacgacaacttgcaggagtgagttctcttcttccaccctgtggatcctgggagtcaaatttaagcctgcgttggtcagacttggcagcacattttactagcttatccatctccctggcccaattattcctttttttgtttgtgtttttttataactttttgtattagaatgaaaattattttacatgtcaatcccaggtgtgttttgttttttgagacagggtttctctgtgtagtcctgcctgtccttgtactagctctgtagaccaggctaaccttgaactcagagatctgcctgcctctgtctcccgagttctgggattagagatgtacaccaccactgtctcaactcccaattactccttttttttgggggggggtcttcgagacagggtttctctgtagctttggagcctatctatcctggcactcactctggagaccaggctggcctcgaactcacagagatccccctgcttctgtctcccgagtgctgggattaaaggcgtgcgccaccaacgcccggcccaattactcctttttaatttacttcctatgtgcagaacttttgcagtgttctcacaaatggagagatagagccaagcagtggtgaaacagatgtgttctttatctctcagaagtttcatacgtgccaataataacacagcataaaaaagagtataccgcagttactttcacagtaggaaaaagtcaggaatggggatctctgaggagggagggcagagggatctgtgtagtggcatcttgttctgccaatggacttggggtggcggccacatcttaaggtgtgactttactgtgtacagacgtgacccctcctaaggaagaggagaggatggctctttctcctgggttgtggtgggagcaccctgaagggcagaggctgcatcttcaggagcaggaagggtcacgcagttattcaccatcattgtgtgagtgttccccaaataaatacctattatttctttatctgggtatttgtggactccttcaaacagccttcagatctgaagataaaaactgggaccaaagaccagcattcaggcagtgggaaggaatagtgtgtcccaagactagtaacttgttcagcttggctgaaatacaaggaatgcacacagcaataacagataaggttggactatcagcagaactgggtcttgttataaaacttcaagctaagtatctggctcctccctgtgtcagcttttccatctcaatagcagcatgagggagaactggagatatgctcagtttgtagaatacctgcttggcatgcaggaggccataggtttattcccagcatagtgaataactataaccccagaatttaggagagggaggcaggaggatgagaggttcaaggtcatcattacacagtgagtttgagtcaaatgtgggcaaccggaaagagatcctcttctaaaacctcaaagtcacgcaaaacaaaataacaagaacaaaactccgtatttgacaagaaaggttgctttttaagttaatgtttttgagaatttcatatgtggtatgattcccaacacccttcctactccaaatcctcccatgccccatcactccctctcaaactcatgatctcttctataattatcattgcatgtggacacacacacacacacacacacacacacacacacacacaccctacagagcccgtttagtgttgcacttacacacatgtgctcagggctgaccccttgggataacctgtcagtatgtttgtctctagagaaaactgatgctcctcctctcagcagccacagtttgccagtagctcatcaagaggtggggcctcatgcaagtcccctcatccctgttggcgtgccttgtgttattatgcagaccttgttcatgaatgaagcatctctggctttaacaatcttcctgctccttcttccaatgtttcctaagccttaggtgttaagggttgcattgtagacgtttgggggtcctccctttgtattgttggccaaggtggtccaaggttgctctctttttaagatccagattagctgtcacagtacttagatgctaaggaggggctttaccgccctctgtcagagaaactgaaacccaaaggagttctcaaactgagtacagggcagggtcagaatgggactgcctggctgagatcagatttctattcctctttcctcctgggctctgtggaatctaaagtcacattaatgtcacctctctagagcctggaacaagtacctcctttgggcgggaatacagcttaccataacagactgtctctgttcctcagcctctctacgaactgccacttctgcaagctggctaacattctaagtaagatgcgatgtgtccaaaacaaacaaaaacaaacaaacaaacaaacaaagcattgggctggggtgcatgcaggattttggaattgtttttggtgtgtttttgttttgttttgtttgttcttgagacggtatctctgtatatagacctggctctcctgagactccttatgtagaccaggttgcctttgaactcagaagtcagagattctcctgcttctacctccatagtgctaagattaaaatcctgttctaccaccatgctgggtcaggatttccagatgtcatgcaacatgatctcagggaagtaagccctcttccctctctgcacctgttggactccttgtataaatcttgtgagttgcactccattgcttttcctggtgtggaccttaattaggatagagcatatagttaaaatgtacattctaggacaggaagatggctcagtggcacttgctgccaagcctgaaaacttgaatttgattcctgattcccacatggtggaaagagaaaactaattcccaccagttgtcctctgatctacacatacacagagagagagcagtaagggggagaggaaataaagaggagagagagagagagacagagagagagagacagagacagagacagagacagagacagagacagagggctggaagtgtagtcatgtagtcatgcctttaccccagtgttgggaggtagaggccggcagatctgagcaccagaccaactttggctgcatagtgagactgtttcaaaaataaagagggtgattgaaacaaagtaatttttttaattggttgaattgttccttcttaatatttactaagtattggtaaatacctgggtactcattataggctagacctatctaggtgctggaggatacagaaatgaacaaaacaagcaaaatccccattcttgccagccattggtggcacacgcttttaatcccagaactctggaggctgaggcaggtggaaccgtgagtactagtctacagatcaagttcaaggatggccagtgttacacagagaaactttgtctccacacgcccccacccccgcccaagcctcataagttaacattgggtatgacaggcataatgaaacgtctgtaattcaatcacatgggcgactcagtcagtattactctgacttgggatcatcttgggctacatagccagtacccgggcagcaagacttcatgtccaaaatacataaaggacttggaagatggcagtcaatgaagacccaagtggacccaagtgcagactccactctagtgaaaagctaggccaggggcctgtaatcccaactctggggaggtggacacggcagaatcccaggacttgctggtttgctcagaaaacaaagtgaagggctgacatagcccagtgaataaactgcttgctgcccgagcatgaggacctcagttgctagccccagaatcgacatgaataaagggtgcaatggcacatgcctgtaatcaaaagctctgggggagcagccaggggggactgaagagatggctcagaggttaagagcaccgactgctcttccagaggtcctgagttcaattcccaaaaaaaaaaaaaaaaaaaaaaaaaagaaccatggggtcttgcaggcactagcttacaaacaaacaaaaaacaaaaaccggtgagccccaggttcagtctctcaaaagctaaggtggagagcgacggaagacagcaaacatcaacctctggacacacactttgcacatacacgcacacacacgcgcacacgcacacacacgcgcgcacacgcacacagcggtggtaaataggtgtccgctaggctcccgtgacgtcaggcggttctgtgacacggctcctctgtgacgccaacagcgggcaggtcgcagacgccagggctgagtcggccgcgccgcccggggttcacgcagggtccgaccccgcggcgcgcggcagctgagggagggccgagggctttggctgctgcggcgacttcggcttcccggggtgggggcagccccaggtcaggatgcggcggagccaccgcccaggctcggccgcatcctctcacaatcacgcacccgacttctacagcgagaacagcaatagttcccacagcgtgacttcgggggacagcaatgggcgccggtcccctgggccggagctcgagcagcccgagggcagaagggcccggggctcgagctgtggtgagcccgccttaagtccaggagtgcccggaggagacacacgggcaggaagctctcggnnnnnnnnnnnnnnnnnnnnnnnnnnnnnnnnnnnnnnnnnnnnnnnnnnnnnnnnnnnnnnnnnnnnnnnnnnnnnnnnnnnnnnnnnnnnnnnnnnnnnnnnnnnnnnnnnnnnnnnnnnnnnnnnnnnnnnnnnnnnnnnnnnnnnnnnnnnnnnnnnnnnnnnnnnnnnnnnnnnnnnnnnnnnnnnnnnnnnnnnnnnnnnnnnnnnnnnnnnnnnnnnnnnnnnnnnnnnnnnnnnnnnnnnnnnnnnnnnnnnnnnnnnnnnnnnnnnnnnnnnnnnnnnnnnnnnnnnnnnnnnnnnnnnnnnnnnnnnnnnnnnnnnnnnnnnnnnnnnnnnnnnnnnnnnnnnnnnnnnnnnnnnnnnnnnnnnnnnnnnnnnnnnnnnnnnnnnnnnnnnnnnnnnnnnnnnnnnnnnnnnnnnnnnnnnnnnnnnnnnnnnnnnnnnnnnnnnnnnnnnnnnnnnnnnnnnnnnnnnnnnnnnnnnnnggccggggcttgttcttccgcggaccgaggctctcccgccccgcatctgggggtgcgcagggagcgcggcataggcgcgcggcgggaccacggcctgcccagcggtttagcactaggctcaggagcctgcgcccgggccccgggggaaatgcgggtccgtggtgcacagcacctcaatggagccctgggctcccacagaaccgtgtggatcttccgcagtcttggaggagcagctcaaccttatcccgagcctggatctgaggcaggagatgcctccggtgcgggtgtccaagagcttcctgagtacgagccagaccagccccctcccctctgactggcactcggaaccccagtcagttctcctgcccgagactgggtcccagagtccagcccgatcccctctgaccttggcactcggaagcccagttctccttccccggcccgggtccgagtgtccggcctcagctcgttttcccagcccaccctcgcctcctgagcccccggacctcaccccgcggccctcccgagcctccctgaacctgcaccacccctccctcatagcgcgtcctctctgaacggcttctcctgtccccgtcccagacctcctctttcaggtgctgagcgtattgttatcggtggcaggagacgcgctggtcagtgtgtacaggtcagagcaaggaggagcagggatggctcagggaagggcagcagggctgggccccaccaaggcttgagcttattcgtgtctggttgagtcgagttcccgggaactgggtctaggatcctggggtcgaggcgagggtgggttagggcctcagagcatcagcttctgtcacggtttctcagggaggtctgctccatccgcttcctgttaactgctgtgacgctcctgagcgtctttctggcaggtgaggagcttcgattccctggggtcccagctctgcaggtttgcagccaaatccagctcgcatgtccctgtgcccctcagctcactctagtgacccctgcttggtctctcacagtccttgtgcagccccagccaccatcccaacccctttgctttcctccgtgtccctttataccagagaatgccccttctctttctccagcactctggtggggtctcctgtatctggtccccgctttagagaatgtgagttggggagactatgtccccaggtggggtggaggttgtgtgggtgggtggggcatcactgggctgctgggagtgggcagtataggaagctttgggtataatatccagaggccaacggagaatgggagggaaatgggagtagttctcaagagggaggccgcgtgagtctagccacgccttgcagacttgggagaagcttgcttatttgtccctccttatttgtcccttcaacaggaacctaaggagatgctgactctaaggtgaaagggcagctggggtgggatgtgggcagctctgaaatctatctatgggggccagggacaggtagctaaccacatggtgcctaccgcctccccccccacgccttgtagccaataccaccagcgtgtgtactcccagggccagcagctgcagcagctccagacagaactgaataaactccacaaggaggtgtccagcgttcgtgcagctcacagtgaggtgtgtccctgcgttggtttggggggtgggtgtaggtattcgctctgcgttcactcaaggctgcactttggaactaccacagcctgggttctgagacgaatcttcgctccagatacccacagtggggactctttttctaggcccttaaggtcctatctctgagtattgagttactgagaggcaggcccactgtaaactagcctgcaaccctcctgtcccaccctctgagtctttagagagtggccaagctcgtgttccagaggctgaatgaggactttgtgcggaaacccgactatgcactgagctctgtgggtaagacacaaatatgtggaaggaacttggactccaggtcatagacaactgtgttaatgcgaaagtgacttctgcctgttctaggagcctccatcgacctggagaagacatccagtgactatgaggataccaacactgtctatttctggaaccgcctgagcttctggaactatgcacgcccaccctcagtcatcctggaggtgggcctggaaccagggtgctggggatgggaccaaagggcaagagccagggtaagagcaagaatcaacttggtagaggcaggactggagttgaggtcagtttggcatcaggaggtgccccactggaggcagggtctggcatggtgtgggaaggctcctgccaagccaaggatgaagttaaactgaagagaattgtaaactctggggacttagcattgcctcacacgactaggcaagaaccaagggaacaggcaaagctctgggctgagaagctctagggcaaggtcttgctatccagctcaggctgctctccaattctcagtactgtctggtctccagttcgttatatgttctgatggtctgcccaaacccctgcagccagatgtgttccctggaaactgctgggcttttgaaggtgatcaaggccaggtggtgatccgactgccaggtcatgtgcagttaagcgacgtcaccctgcagcatcctccacccactgtggcacacactggaggagccagcagtgcaccccgggactttgcagtctttgtaagtggggccgaggccaggaggtggggaagttttagaaacccctaggtagtggtgagaagcattgccggcatttgtcattgtttgttcatctataagctggacatactcacaggctgctgcaggttgtaagtttagcatccctggtactaggatgtcctggctgttactggtttcttcaagcctacattccacaatgcaccacctacattagaatgtgaacaggacccatgtagctgttgaacatgtatgtagaaggcctgagcaaagcagtttcccctcccttcctgtgtctcacggggctcctccatatactcttcacccaccaggggctccaggctgatgatgagactgaagtgttcttgggaaaattcatctttgatgtgcagaaatctgaaattcagactttccatctacaggtgtgtttatctctgggggtgctaacatgggggcagtgaacactgatggggaggacagtcttgagagcagttgttggcatgatccatttgtttccccagaatgaccctccatcagccttccctaaggtgaaaattcagattctaagcaactggggccatccacgtttcacatgcttatatcgagtccgtgcccatggtgtgaggatctcagagtgggcagaggacaatgccacaggggtcgctgggggaccccattaaaaatgctgatggttgaagcagaattgagatttgtgctaaagaaaactgcttcagagttgggaggtcaccttttggggaaagctctgcctatggcaggtcagtatggcagaatatgcccctcaacacatcctcttttcctggaaaagtccagagtcatatagtagcaaaagttgatgtttccagtgtctaccatatgcaagagacagtgttgtggacattctacaccgtacaagatgcagcttgatcctcaatacaaagaaggaaactgctagtgcaacttgctccactcacgctagtgaagagttacacaagaatggggccttcctcaagaggcatccttccctcttcagctggagaactatcatgtcgctaaagccacacgtcaactcaaatctctaccccaataacggggaaactctcctctggcaaacagtgaaaagctaagttctgaaaacttctaggaaatctttgagtcaaagctgacctaggcttggtagccctcatgcagttggtcattcctaggaccttaggtggtcatctgacgtccatctgatctaagtcttcgctggaatggtgaaaagaactaggggtggaaagtacaaacaggcagtcaagtaagtcgagttcctagggtgggaaagggcctcacatgagcaaagacaagcactatttatcttggatgttgggatccttcctactgatatgtgaagcagatcacttattattcacctatttaaattagggtgatagtattttgtcatttgaaaaaagcacttacaccaagtattttcaaaacctaagatttcggggctggagagatggctcattgttaatactggctgcccttccagaggacccgagtttgattcccagcaaccacctataactccagttctagggaatctaatgccctcttccagccttctcaggcactaggcacacatgtggtatattcaagcaggcagaacacccaaacacatgaaaattcaacaaaaggtaaggttaggacaggtgggatgtctcaacagggaaagaccaccaagcctaacaattggaatttaatccctgggtcccatatggtagaagaagagaaacaactccagggatgtctgtcctctgccccccacatgctgtggcacttaacacacaaaaaaatatactaaaaatacttaaggatcattaagatgactcaagtgggctaaagtgggcttaccaccaccaagtctatgacctgaattcagtctctgggacccatacaatagatagccaagtctcacaggttgtcttttcaactccatgtgcacatacaaaataaatgtaataggaacaaattaaaactaaggttaaaaatagaactaagggctggatatggcagcgcccagatgcttttaattccagcactcaggaggcaaaagtaaggggatttctatgagtttgagtgctacatagaccctgtctcaaaaaaaaaaaaaaaaaaaaaaaaaaaaaaaaaaaaagaaaagaaatagaactaaagatcggacatagtggtgcacacctttactcccagcacttgggaggcagagaccagggcaggtggattgatggagtggatagagtatcagtttgcctagtctgcaagaccccatggccctggtttcagttctcagtgcacataaacagaagccagaggaatcaaaatccttaagacttttcatacattttcaccatctaaggctggcctagaactcactatgtagcccagattagcataaggttcaaggcattactcctgcctcaggcactccagtgctaggactgcagacatgaaccacctcagtcagtttctgttcatactttttatagatgtctaagtgtgcacaccattgttagtgcgggcggagttcagaggacagctttgtagagttaattttctccttccgcctttacgtggatcctataagtaaaattcaggttgttaaacttgtacagcaagcacttaatccagctagcaatcacacaagaccctgtaagttttttgtactctaactgtattggaacatgtccttgaactctacagccccctacgtacactcaaagataagataagtggtagagcctgattcaaacatggcttaggccctaggcacaattcccagtaccaaacaaaacaaaacaaatgcagccactgagggagtatttattatcattgatatatggatacatttttaaaagcagattagcatttataaaaaataaaattttcatattgcatataaaaacatatgaaacagtaacagctaagggaaaaataatttgaacatgttgaaaagaacagcagaatgaagactcttgacacatatagccatgaacaggctactgagaatgaagtcagtgtatgaaatgattcctagccttacctatggaaataaattcaaactgaaaatgagatctgggtgaggaaggtgaccaagggttaacaaatggaatgagtgggactatgactttacagaaggtaacctgtaatatctgctaaaattttaaataccctctgtgagctatcatttccatatctagaagccaattcctcaaaaatgagtaagcagaacaaaacaaacctaggggaattactaaattctggtataagagagtaacaggagacaaggcagtttggataaggcatccaaaataaatgcaaaccagatacaaatagctcatgtgatcccttagaagatgttctgtctgatctgaaactcagagaagaatttaagtccacatcacaatcacagcaatcttcttgacccagacttccatgtgttgggattatagccatgagctaccaatctttatttcgattatctatccccccacccccaccccctaccccccccaaacccccttgcagggttttctctgtgtaacagtcctggctgtcctggaactcgattagaagactaggttggcctctgcctcccaagtgctgtgactaaacgtgtgcaccacctgcccagcccattatctatatttatatgatattgatatttgaaacaatttttcctttgtttttgttttgtttgtttgcttgttttgagacagggtttctctgtgtagccctagctgtcctggaactggtctcaaactcggaaatcctcctgcctctgcctcctgagtgctaggattaaagatgtgtgccatcacactcagttttgaaataatgttttaggggttggagagatggctcagaggttaaaggcacccactgctcttccagaggtcctgagttcaattcccagcacctacatcacagctcacaaaattgtaactacaggatctgacaccctcacacagacatatatgcaggcagaacactaatgcatataaaacaaaactgaataattttagatctctatgaattcgagccagcctgatctacagagtgagtgccagtacaggctccaaaacaatacagagaaacgccccccacaaaaaactttaaaatatctctgcctcctgagtactgggattcaagttgtgcacaaccatgacttactggcagattgagtgaaattttacttctgcatttaaaagttccctcctccctgcaagagaaaatctgtttttctaaaccaggcattaagtgcaccatagatccatctactccataagctgaggaaggagaagctcttgagttcagagtctgaagccagcctgcataatgtggtgaagatgggtccctcctacaaaattttcctacaatatacatgtttaatctctaatattaaaaaaaaaaaaaaccattaagctggacatactggtcatgcttatgattttagcacttgggaggtgagggtaggaggactaggaattaaagtcatccttggttacacatgtagctcagggacagcctgatgaaaaccaggcacagtagcacaagtctctaattccagcatccatgaggttgaggcaggatggtaaattgcaggccagcttagactacacaagtgttcccaaaaaacagtggaacacagctagtcctagaggtctaatagtcgtcactctacagtgaaatgtgtcattctctcaacttttccacctcttatgaggcatagcaccttccatcttatccatgttcccagctcagctccactcggaggatggacaaccacacgcttactttatattcaaacttcgtgtttgcaaagtgagttgacccaatttgcttggataggattaccagaccaggggtaacctttcactcaacaagcccaaggtcaacaaagacttaggtcaaagtaaggctatcttacttacaccggcctgtaacctcgagaaagaggtctttcctgaatggtgtcaggcacaggtaggtagtcaagagcagcaaaagcagaagtaagtatcaaagtatcaactataaagtgagaagaatgtgcaggtttggtccatgcctggaggatggtaccagctgaaatagatgggtcacagcctactctcccaggaaacctatgcctgggggggctgtgcagggaccttggctggagctggaggtgccttcaatggggcccaaccttgggctttgaagtaggaaaccagctgagtaggcacttctgcaagtacagtctgtgccagtgtctcccgtggagcctgtcagaagaagaaaggcaagttcaatgagggcctgtaggtctcccagggtctacatcttaccccaaattcaaccttgccagactgatgaaaaggctttatctgctggacctcaactccattctcatcaccctgcaaactcttcccatactcacattctgaaatcgtcgatagggcacaaactgtactatgtcacgggaagctgcttctccatagcgagtacgaagagggccaccatcagcatccagctgctccatgacctcaaagtcagcaccacccacgcccacaatgatcactgacatgggcagctttgaggcttgcaccacagcctcacatgtggcctccacgtctgtcacagcgccgtcagtcaaaatcaacagtacgaagtattgctagagaaaagttcatatactgaggaaaattctctttcccaacccctcccaacaaaccaggcacacattcccactaatgagatggcccccatgatacagtcctcgccacctcagcaccacagctatccgtagctcttaccgaggcagtcctctgctgtgccgcctgggctgcaaatctagccacatggttgatgatgggtgcaaagttggtagggccatagagacgaacttggggcaatgcttggcggtaggcatctacaataccctggatgcctacaaagaacaacagaaaattctgaagttgtagaccttagacctcatgggattaagtaagacctgaaatctgtccatctagacccagaagatttggaaacctgaaagtgttttacccttgtcactcaggacacagttctatccaacaaatgaaattaaaaggcgccagacagtggtggcgcacgcctttaatcccagcccttgggaggcagaggcagaggcaggtggatctctgtgagtttgagaccagcctggtctgcaagggctagttataggacagcccccaaagccatggagaaaccctgtctcaaaaaatcaaaagggcaaagacaacaggacttgatataaagaatatcttgtattaaaactaatattaaaagttattttctgaaccagtggtggtggtacacacctctgaactcagccccttgggaggcagaaacagaggcagaggcagaggcagatggatctctgatttgggggccagcctggtcttcaaagtgagttcgaggacagctagggccacacagagaaactgtctcaaaaaaaaaaaaaaaaaaagcatttttctgaactgggagaatggtttagcctggttatgttagtactttggaaactgagcaagaggattgctatgagtatcaagagagcctggcatacacagtaagactcttaaggaaataagaccagcgagatggctcagcaggtaaagagcttggtgtacaatcccagtgacatgagttctatccacagaactacacagagatagagggagacaactgaccccacaaagcaagatccacctgccttgtactcccaaaagctagggttaaaggagtgaactaccgtgcctagcctgggtcacaagttagaggctagcctgcatacttctaggccatcccagggtacagagagtctctgtcaagaagggaaagaaaaagtttgacagactaagaagacaatatagatttgaacatatatatgtaatatattctagggttataaaagaaaggggactatgaggtagaaggaaaaggtcttaaggtacaagataaggtaatggagccgggcagtggtggttcactctgtaacgataaatctttccgccaagccgcctgggccctgccgccacatggttgcccaaaataacacacagagattaatattaggtacaatgatgctgctcaatgactaggatttcttaactgtaagattagtcttaattatcaaccataactattaatctatatatttacaagacttatctaatagaggacgcctgtcttccttgctgccacatggatactctccctcaactacatttcccagaataatccttgattcctactcctacttatcttgctttcctattggctaacagtgctttattcataaaccaataagacaaacatatacagaaggacctcccccatcatcactcctttaatcccagcactcaggaggcagggacaggtggatccctgggttccaggccagcctgttctacagagtgagttccaggacagccagggttacacagagaatcccagtctcaaaaaacaccaaacaaaaaggcaatggaatatgtgacatgaagcaaattggggtactatttggaagggagggctaggggtgtaataagaagatatacgtgatatatatgtgtgtgaatagcacagacctataatcaacagttgggaggtggaaacaggagattcagtttgagactattgtgaactataacaagaaccagactcaaatgccaaaaaaaaaaaaaaaaaaaaaaaaagccaaaaaaaaaaaaaaaaaaaaaaaaaggccataataaaacaatcatatgctgatgaaggtttaataaaagtaatcagggtctgggatatagctctgtggtaaagcaaattacctagtccctcagtaacatagaattatttaaatacaaaagaatggccttgattttaggaaacatacttaagtatttggggtgaagagctatgtgaacgacactgggcacaaagttgatggaggccaacgtgttctgtataccattatcaaatactccagggaaagggacttttaaagccaaactcagaggcagtgaggcctctggggttaaggcagttgtcaccaagcctgactacctgagttccatccccagggaccacatggtaaaaataagaagacttccagaaagttgtgcaatgatgctcatgaacatacacatatacactgaatacacataatttaactttttaaaaatgtaaactctgctgggcactgtggcgcacacctttaatcccagaaactagggaggcagagacagatggatctctgtgagcttgaggctggccaggtctacaaagagagttataagacagctaggactattgcacagagaaaccctgtcttaaaaggaggagggaaggatatataaccccttctcttcctccctccctccctcccttacccctcacccaactaccctgtagctccaatgactccagaattcctgtgactgctgtaacttttctctaaggctgatgttttgttttgagccatgcttatgttatttagtcttctgtgactgctgttaacttttctctaaggctgatgttttgttttgagccatgcttatgttatttagtctagccttgacctctaatttccccacttgcacttcaagtgcttaagattacactggcttccaaatatggttttacatcaaaatacaaagtgagaagaaatttttagattgaagccatagccttgtgtggtgctcacacctgcaatcttagcacctacatggttgagggaagaaggatcacctggtgctcaaggctagctttggttagtgagttctagaacagtccaggtgagggtgagatccggagctggagcaaagcagcatgaactgctcttccagaggacctgagctggattcttagcactcaaaccaggaggctcacaaccacatgtaactccagctacaagagatctgttacctctggtctctgtgggcacctgtacttacatgtacacaccaacacacaaatagacacccatacatacaaagaaaaataaaaataagaagatcagatgagatcaggtcaattttttttttttttcactttaacttggtgctcacgtggaagtgctggcaagacccaaatcttgggtcttttgtttgtttgtttgtttttgtttttggagacagggtttctctgtggctttggaatctgtcctggaactagctcttgtagaccaagctggcctcgacctcacagagacccccctgcctctgcctctgcctctgcctcccaagggctgggatcaaaggcgtgcaccaccaatgccccggctttttgttgttgttgttatctcaaccaagtttttattgctctagcaactgcaaaatatacaaatttctgaaaggtgtgtcctgtttaaaagcttgcaaagcttcttcccaggcccttgagagagacaattacacagaacatgaagaagtcatcaatcacacattgaaaggccccaaaccaatggatagttaaacccaatctatacagctttctagttttaggcttccttatacatatttgataagtaaatagctatcaaaataataaaaaaataattttcaaatattacaaatgaaaatatcattggtgtgattccaacagtttttcttctcataaatgaagcaatgcccagctttttaatacattttttaaagacttattttgtatgagcattggtgtctgaactgcatgtatgtctctgcaagggtgtcagagctcctggaaccccaaatcttgggtctttacaaagaagcttggaaagttcccataaataactacctaccctggctggggatgtgtctagtcacagattgttttcccagtgtatagaaagctctggactacacccttagcacagcaggcagtgacagcccacctagcccttttccatgttttcatttgagaacacgttgcccaggcaggtcttgaacttttgattctcttgccccagcccctctgccactagccccagataactttagttttattttaaaaccaaagcacaaagaggtaagcaacttgcccaaggccatcagtaataagatgaatttaaccccactgggctagctctgacctccactcctctgtacaaagaagcaggctcctccctcctagtcccctctgcccaggaacactcactcccagtgtgagactgtgtctcactggagaatggggaattacctgcacagtagggattactgggattgaagttcaaggcaaattcatgtgagacctgagggcaagaatgaaaatgactcaaccaggtatgggttacctccagtattagctagcacacaggagactaacacttgaagatttcaaatttaaacctagcctgagttatatagtgagaccaatttcaaaaagcaaaaaaggaaaaacaaaaccccaacaaaaaccccaaaaaggctgggtataggagtttatgcgtttaatcccagcacagagggacattaggatttcagtacctttggggcagtctgaacaaaaaacaaaaagccaaacaaaaaaaagagagagagagagagagaaaaatgacaatctttctttccaccttccccttgttccccttttttgcctcctgagcccctccctaacacacactccaaacagggtctatgtaaaccaggcttgtcttgaactcagagagatccacttgccactgcctcccaaatgctgggttaaaagttgtgagccacaacacccagcaaagatttcattttatttccaacaggattttttcggtgttgccttggctggtcattacatacaccaggctagcctcaaactcacagagatccacctgcctctgcctcttgagtgctgggattaaagttgcgcgccaccatgtctggcaatcagaagaatgcattgggttccctttgaggccaagctccaggtagctagccatcttacaagggtgctgggaactgaagtgttcaacagccatgccacctctccaggtacccccagccctttctatgccaagacatgtcattcttggggggctcaagtgcagtcagtagagtgcatgcttagcttgcttaagaccctgggttcaagcctcagaactacaaagtcaaagcaagggcattctgatgtatgcccacgggtgcgagctatctggccctgcacctgctgtataccgcccactagaacagatctctgtatctctccttgtagctcaatgccaagcaataaataaatttaccacagactctggaattaggatcttgatactaaaacctagaatagagagaaggaagaagagagcttacctgccaattagggggtacctgggccccaaatccaaatgctgggaacagcttgtctctgtggagaagcagtgaggggatcttgagtctagaggctgagatgtgaacagggcatgggagtggccagaacctgaaactcacgagtcatagtcttgaaccacgctgcccacactccacagtgctgtcagatactcgttgactcctgaagggctcagatagtgcagggaatcaggagaggatgggtctccattggagccagtgaagtcaacacccacctgggaagagaccaagaatggaggtaagggcggcctaagccttaaggcctgatcacgtgcccctaggacagcaacttacagtaaagttgatttggcagcctcccatcacatagtccaggaaggaatactctgtctctacctgcagatgaaaccggggttaggccatggctactagcgggctagcatcatacagtccaaagcttagaactcagagcctgggacacatgggctgccatcttacccggcaagttttcactcggacagttccagagttcttgtagcttttctttttctgctgcttctcggggtggatacattcaaattcagcctggtggagagaaaaagtagggcaggaaaccaccacagcatcagctaaggacctaagctgcactggccagacgttcctatggacagcagccatcacggcccaccggagcactgtcaacagtcactacctaccgggactgcttgaagttgggccaaggtggtgtggaaggtaccaatgagatcatgtgacccgtcactgtcatagtccgagcagcgcacctgagggagagtgtgtgtttgtataacagagatacaacacagggccggcaagaagtccctccccagaatccgttcccttcatcattctatttacagttgactcctcacctggatgggtgtgcccaggtccccaccgcagaaatgctgaagaggaaccgagaagcgcttccatgtagggttcaggttgttcttgattacctggggtggagggtagtgagctctgagctggcccatgaagatctcccaccctctcctacccaccagtttttctccctcagttcccaaaccctggagattctctcccgtgccaaccatcaacaccacgagtcacacctcagatcggtaagtcaggtgccacttcccatcaccttggcggaagaactccaagaacggatcagattttcctaggaagtcctgccgatgccaaagagattcagttataagacttcagaagacagccagtgtcagccctctgcccccttaattctcagatccccatggcctccttccaaacacaccttcttgtctaggtttctagcttctacctccatggttactacccggttgtcctttaactcctgagctgaaacctagaaagagaggactatatcatctcatgaattactcattacataaactgcttccctgcccagggtttatttcttacagtaatggttccctgcccggcaggcttccccggcttcaacatcaagggtagagtcaaagtctggctggacacaatctgggggaaaatgaggtgagagaggcttcagcaccttagacagggtggggtcctgtgtgactggcacatccaagcttcttaatccctggccctacacacctgacctagggagcactctgctgcccctaagaagtcgtcatcccccagctccggtgtcttgttgtcaatgtcatagattccaaagcgcagcttctggacagtctcaaagtggtactcgacctgcagagtcttggagaacgcagggcttgagcagttccggactcgctcagtccggcaaagctgtaggaagaggccactaagcatcagtaacaaacctgccacccccaaacataaccctcccctccctcaatgaccttaaccttcaaggttcatctcacctcagcccaggtgccccctcccacatcctgtaaaaggacgcagagtgggtcagatttggagccgatgtccttgtcaatgagatgatcacaggaaatggacagctgcaccaaggtcacacagtgggccatctggagggagacagcagggtcaagcatcagggcctctcctccatccttcactgactatagttcccagcctgggaaagccacacgcaggctttacacaggcagcctggacaccccggaaccctaagtggactcaatagcacaggacacatttttgataacaaactctggctccagatgaatccttactctctaagtggtcttcatctcaacaatgctgtccagacttggaacttgagccttaaccactgcagagcataatcaatctctatctggcctcttagcaccttccccaaggtcagaacgaggctatatttcaattccaacagtttccaggggggccatcatctagatactgctccctaactgctgataaccataacctctaattctgggacctgacatcttgcaaattgggatccattccatccattaactcttcttatctctaatcagctgctcaggtctactcatttccatgtatgtcatgatctagtctaagctactgtttaggttacctagaaatggcaatagtttcttcagctgctcacttaacctcttgccaaccctacttccacttcccattaccacccagtggactgttaacatagcaaccaaacttatcctgtcagaacagtccatcacagcacacaggaagcagaagcaggactgctgtaagtgcaagggtcaccttagataacatacagagacttccatggctacaaagtgaaaccctgtctggggctggagggatggctcagaggataaaaacattggctgcttttccacctgaactaggtcctgagttcaattccaagcaaccacatggtggctcacaaagtgaaaccctgtctcaaaaaccacaaagtatggctcacactgtaatactatctctgggaggccaaacagaaggaataagagtacgaggccagcctgagttacaccgtgagtatgaagccagtctaggctatgtgagatcagaccagtgtgcaacatgagtggctcacatctgcctacaactccagctccagggggatccaatgtctctggcccaaacatttcgtccacggacacatacacatttaaagataacaacaacaacaacaacaaaatcctcactgatatcactctaagctgcacactggtctgatgtaccatctgaaagatctaggtccctctaatttaatctgccagttctctcgctcaatcattctggcctttgccatccctcaagcccactggattcctattccaaagccccgcagtcacaggctgctctttgtttttattacccacatagtggttccctcttctgtaaggttcttaccatcgcatcttaatgtaggtagtcttgcctgccactctaattccaaccctaccaccactgacatcagactccatcacagccttcacaccagtatccaacttactatacatattttagttatacaatcagtctctagcactaaaatgtaaactgtacaaaggagaatttacctgtttgtgcacctgctctatcccagcaactaaatacacttgttgcatgaaattcaagaggccatctccaggaccagctcacagactgacttgtctccaaatcaagcatccccaaacctctacagttcacctatttcctccatcacaatcatcactaccttgcatgaatcaacacagtaactacaacgtagttgggcctacagcccaggatgatccacaggcgacacacaccatctacacaagtctccaagattcctcactggacttgcttcaacagcccaacttcctacctagcagtgcttcctgggaggtctccagcctccttctgcccccagcctgtatcatctcacgttggtctctaaagtctcctgtttgttcttgttttatggtattgggaattgactagggccttgtgcataccaggcaaccatctgtcgctgaactatatcccagctctagcctcccacccagaattcagtacacaacattgattatttttagagtcacacacagcacttgctcaaatgagtgttaaaatccactactcttgatccaaaaggttgcaaccaaactaaaccacatgtgtatattctcactcccaccctggaggcctccttcttccccaggctctatattccatgtggctgcaagacagggtctggaagcagatgataaccccaacaccacacgatggcaggtcctgtgttctaaggctgctcctccaagaggcctgcagacttccaatcttcccaatgactcccctagaggctcaacagaccacagcttatgctgaattccaccattgtcagctcatgtcttgacaaaggatcccagaactcaggtagctcacaggtgtatcaactaggtgggctgtgctcaccaccaaacacaaaggaatgccgaatgcagatcaaccagaaagaaccaagtgtatacattacttgaaagatctagactgcaaagtctcaggtaagtgtatattcgatagatctgaatactctcacacaggaatatacacagggaaacagcatgtacacacacccacccctttgtattctggcacagggttccatgtaatccaggctggcttccaatggactttgcagatgagggtgacctaaattctagattctcctccctttccctgtgagtgctgggattacaggcatacatcaccatgcctgagctatttatgatttatacacttccttccgtatagacttgtacattgaaggccctcattagctccctacttaaccccaatacacagcctaagtatcaattattctaaaccctatacttttatcccacttcttaccctcccaagtttctcctccttggtactgcctcacctagccaacttccagtctcaacaaaaaaccctgtataactgcccgatgactgtaaacagcaaatgctctagcaagctattttgttctactcctaagggagaatttctacagaaattgctaagtctttcttagtcagccactttccttagctcttaccaataggagacaggtgagaacctacataaccaacatcttgatacccacagctctggtctgacgggactccccttatgaattcttgccagggaagatttcattgtctttggataactgcagtggtctccttaccagtctttctgcaacctcacagccatttctgtgtttactagctaaatgaaaaccagatcatgtcacttccctgtttaaaactctgggacagcttcccaatacattcaacataaaatcattcgatgtaaaaccctaactttgaaagcaggagagatgtctcaggggttagagcccttgtgtttccaggggaccagagttcagttcctagcacccacatcaggcagcctacacacaggtgcctgtgacttcagctccaaagaatccaatgccctcttctggcacgcacaggcactgcaatcacaggcacaaacccacacagagacacaaacctaagtacactaaattaaaaacaaaaccaacacacacacacacacacacacacacacaaaagcattctgtggctggcatgacagcttagtgggtacagtgcttgccattacctgagtttgatccgtggaacccatgtgtaaagagtcatctaaccacccaagtgtgtcccacaaggctgtccttaaccatccgaagcgtcaatcccattctccatctctgggtctttgtactgtatggttctatgtaagagcaggaactctgtctactttgccagtgtctctggtacctacttataacagacactcggtaaatattcagtaactgcattaatgctgaaattacaacagcagaatcgtatctttctctccccgccatttaattgtgggctcctccaaactagctctgagtatcatctctatatgcccagtgcaacaagctggtactcagctatttgatgaactcatgggaactcacaacttcacgaacttttcatttgaattaatgtacatctgtaaccttccctttcttgcttttttgacaactgagttgtgaaattttaatgtggagggctaagatgtagtatagtggtaagagtacacatatccctgggttcaacccccaacaccaaataaaaataaacgaaaacgaaaaccaaacctgtaagacaaaatttcaatgccagactcctacaattccattttaatgagaatcaagttaaataaataggcaaaagattcaaagattctttataaaacataaataagaaataagcttgtgaaatgatccacagcctaagtggcttgagaaatgcaaaatggggctggacggtgatggcgcacgcctttaatcctggcactcgggaagcagaggcaggcggatctcagagttcgaggccagcctggtttactgagtgagttccaggacagctagagaaacgctgtcttaaaaaaaaaaaaaaaaaaaaaagccaaaaccaaacaacaaaaaactacaatgagatagttagaaatccatccatgcccaacaaagcccaatgttggcaaaggatttaagattcttatagctggtcaaagtattaaatatgtcaccttggaagacagcccagcaagcctgtcagaaagccaagtgaatacctagctaagtgcaattccactggcagattttaatctaaaagaaatgaaaacatcatgtccaaaagctttattaggactgctcacagcagatttagtcattatagcctaaaacttgaaacattcccagtgctcatcaataggagaatgaatcgctatgcttatagaaagccaattggcagcagattaatacctgaaatctgaataaatctgaaggatgaaatgatgattttattcattagatttagaatagacagaaactatctatggtgttggtgcacacctttaatcacaacactcaagaggcagaagcagatctctgtaagtttgaggccagcctggtctaactacacagaagaaaccctattttgaaaaacaaacaaaagaatatgcaaaacctaatctttgctgtcctcctttctcccccaagggagaagtggttgttaactgcgggaagccctaggactccaggaaaagatgttcctttgggtcacagagggtctcacttaattccaaccatattactgtgggtccactgtgtggaaagtagcatatggggcctaactctgtgatgttactaagttggcctggcttctattctcaatgtcagggcttcctgtgcaaccaaggtttcttatttttgttttttttttcttcccacagatctgcccccttttctttcttattggaatattactgtgtgggaaaaaaagaaaaaccttaataacttgcagctttcactgggcagtgagaatcacatctacaatcctgtcacttggggggtagaggatggaagccagcttgggccatgaaactgtctcaggaatatggatatgacacacgtgtactcccttggagctatttcaccagcccccacccctgaagtgacttgctggcctgaagtctcaattctccttcgtctcaagcacagggattgaaggtgaaaaccacaataactacccatagctacttttcttgttgagctaagtttcctttaaattacctgtaatttatggcattaatttttcaactctttctcataagcctatccctgcttggaaatctgtggctaaaaatcctggtgcacttttgaccactgttgattactaactacacaccacttgagacagcatcttttcagatgggctaggctggtttcaaattcactatcctcctgcctttggcttcagagtgctgggattacagcctttgccactgtgccctggcaactgccacatactttacccagactcacttttcatatattatagtgccatttcaatcaacacgaggctttcattccaaaccccttgcatgtcacagtaagatgaatcagaaagtaaaaataagaaaatttatcatttaagagatctggttatgcgtactagatctttgtgtacagaattcctgttcaatcaattgtagacgccaaggaccttctggaattacttaaaacttgtttaatgctaacccatcaaaggggaggcgagtttgctggcacatctgacatagttagctttggtgtctcctctttctgttggaacttgtgcattagcgcagatgggaacacctataaggtaaagctccagccttctctgccttgtttgtggtcacttggggtctcattcctttcaaatctcctttatttgttgtttacctctcctcctactgccaacctcagagctttctaagccctgtacaattatatattctcccttaaagcaccatcctcccagcagggcacacctgcactcccagcataggcaggggatccaaggtctgagtccacaatgcaatgtgcttacatagaggatctatctcaaaaacaaatgaaacccccctcatctcctcccatcataaataaaatggattgactaccgagcccacattctgtgacccaggcagaatttggttaagtgaaatgaggactagaacacaaacatttggactcctgagtcatccttggaacttcggtttttttgagacaggatctcctgtgtggtcctggctggcctgtaacctgctatattggtcagactgacctcaaacttatgcctttgcctcctaagaagggtcgggattaaaagtatgcactttcatggctggcctagaactttctgtattataattaaactcccttctcttttgggggaaaatgtttttatattcactgtcaacctgatgaagacaaaagtatggacttcccaacagtgagcaggcaccaactacttccctcatttcttcctatccatcagataatactgtaccagatggtgtcctgcatatatagtttaggcaaaatgactaagcctcaggttcctcagctgtaaagggtttatgatcaacctctgaagattaatgtaaataatgtgtgcacaactcatataccacccttaagacttgtgctggaattgtcatcgtgttactcagccatcaccatcttccaagcctaactcaggcatgctgactctcccaagctccccacagcagcacgcaatgtctctggaggtcctgtatctaatctacaatgggcaattgcattctttccctgtgtgtctgcaccttcttgcttattgacaaacttttggcaccagggtctcatatagcccacaatggcctccaaccacaggaaagccaaagatggtcagtatctttttgcctatacctcccaaatgcttaattataggtcacaaattctgccagtacatcttagctgggcaccatagacctatattcaatggaaattcaaaacacttgggagaagctggcatcattgtactggaccagacttgtaagaatcccaagcattgtgtgagcaggtggccttggtaagttttaaggaaagactaaatgttgtaagcctcccacattgctccctgggagataggttatctgcatagcattgagataggactctcatcggtaatacaaaaattatgtgcctttcatgttttaaatgacattcattcccctgcattagcaggctctaattgctatttgtaaacccaaaaacagactgtgtcctcctgggttcagttgcatctcagtaccaaatggcctaaaattcacttatcagtcctttaagctcaagagttacatgagcctctccattcccaagagcttaaccaggcaactgtgcaatccctgtctccctttgtctaacaaggacatggcacagatgtggcagaggctggccacaagcaggtcagtctgagtagcaacagcatctcttcagacaactcacgtcatgctcacacctgatgtcgcctaccttggcaagatggagcagctcacagatgctggatcgagtcttggaggccaatcaggaaatcctccagaggctccagaagcactccccacccctcatccccaccctcgctgaacagcccttccccaagaatcaaaagactgagcccaccaacaccattttcattcccgtctcacttcctcaagggatatggaggaggcagctcttttcttacccctgaatctctctctaatttcagaattctccaaatttaaatcagcagctccaaaaacatttctcacaggtcacgaatttaatcaaataatttctttttgaggcagtctttagagcaagctggcttattggtctagattcctcttgcctcagtctcccacgtgctgttattaaagttgtaccccatcatgacccagtcaaagctcttactatggagtgacattctttattcccccccacgtgactaaggtgactaaggactaaacaaggagatttatttagatgcacgaatttctaagaagcctatgtgccacacagaatctggcagtactacaaagcttaaactgtgcacacacacaggaaacctaagtggagaattacagctgtttcccaccttgtactgggatggccaggaaagtctgaaagccactcatccaactctaacatccctgaagactaccccaaagccaaacaacatctcacctatgccggatcactcacagaaaaaaaaatctatcccaaagagagttggaaatggagggaagctaggactgctctagcatgctctccacccagagactcagaatacatcccataccaaacttgaactgcccacttcaaactcctgtctgatcagcacctgaagataacaggtagtacttttgtgtctccctgcttacatggagttggaaaaccaaaatcatggagcattgagagaggctcttccctagaagactggggatgtatcacagggccactgctagtgacttcagcccccacaaccatcaaggaaaaacaggtaacacttgtgtctaagaagtatgaagaattttcactatgaagtgaaaattccattcatagctgggcaggttcctagctcacagctgtaatcccaacattgaggaagattactgttttcaaggccagcctgggccacaaagtgcatttaaaaacctctatccaaacagtactagcaatagaacctcaggcaagttagtttccctttctttatagattcccctatctataaaatgagtggtgatggcaactctagaagttaagctcacccttaaaagtgaccaataataaggatcccttgatagtgggatgcctacagtacattaactctcccatttagcactcacaaatgagtaaatgtgcctttgctccttgtttgctcatggaacacttaggacaggctatgagactgacaatgtagggtttccgccatgcagaaaagagaggggtcacaaagtagccaaatcaaaagtgctgaagttccatgcttttagcttctgttcagggccaaactcataatgattgtcaaaagaaatggaatagctgggttcacagaaccatagatgcaaaccactggataggataatccaaaccttcttttatagaacagaggccaaaggacacatttgccatgggtcacaagaactcatgggagcaaaggggatttctctgttccattctgtcactagttcacatcctgtagttcagtccaatcttagacagttcactattgtgtctcaaacacctcttcttcatggcctatactaaccagccttatacaaagatgtaaaggaagtccacatccaccacaatctcattattggaacaggaatggagggcttgctggactccatgtttataggatttcatagggacaaattttaaacagcaaacacaaatagtaaataaacatgtatagtaaaattcatcgcaggtagtcatttctggaccccgtcctaccctgctgcaacttacatattcaatgcctgttatatggagtgctgtgaaaccaccttcctgagcatcatgagggcaagggcatcgccaaaaaccatcgcctctacagtgtgcatgcaagtttaacagcacagcaaaccaaagcctgcggagtagctaacttaagtttgttcacagggcatgcttccctacccgacacttgaacaagtcacttggttggaatatgtagaggatcttaagactgttctctaaaacttctgtctggaaaactaaaaatttcaacagggaaactgtagaataaacacaaactagtttcacatgtgtcaagtgtccagaaagcctttacacagttcggtggtacagtcagatccaagcacaactaagcacttaagtatgtgaatttaagaatctaatctcttgagaaactgacatctttctgttcaccttcccaccattaagtcctgttgtgctcaacacacaacactgcccccccaaaatttaggacaacatatagatatggctaagctgtagttacaagaagaccaacagaagtggagttctaccatgtaagaagcaaagtggtatctactgtagcaaataaccacctgagcaagtctgtaacctaggggcacagctggtcccgtagatcacaaggctaaagggaagagcagatgctgtgtcagccaactgtccaattgcagcctaacagtatagaacataaggggagggaagccgaactcagagtggagcaagacataaggaaatcagtagccgcatgttatatgttaagactgttcaagcagctcaactccttcatccttttctttcccccctcgagacaaggtctcaacatgtagccctgcctggcttggaagtcactatgtagagcaggttgatccagagtgctggaattagaagcatgtacaatgaatgaccagtctttcttaagtgtgaaaatttaacagcttgtggagtgtatggcagcacattgtggacactgtctggtatgaattatatttaactatctttagcaatcaaaagttccaagtaaatgtcaggaggctacattctgctgagactcatcacctggtacccagatgacttgctatgtcagtaggcaaaacaaaaaaactgaaacatcaaggggccggcagcaactcctgggatgagttatgctgctgcttcccctctgtacttgttttttttttctccttccagattagtaagagactcaaaactaattgttccctaggccagagtctaggtgtataatgggggtgtgtgtggcacacataatatcaattctgccattcacccttctctacaacttatgtcttaacctctcattggagggacgttcccagggcttaagagaaatcaaaggacataatgagatttttctcccctgctacacacagactcagtgtttttgaagtgttgtcctatacctggggctggactgtttacatcagggccgtgtctcctggactcttcagtagcagagccggtatttagagtatgctcttggctgtgacatgttgatccagaaaaaaaacgatgcttttgagactctgacagcacaaaacagcacaaataagtccagaagagcacactgagaattaccatttaatagattaacttgcttatgttgttaaacataaggctttttttctcagaactgtgcttaccaacgtactgtgctaccaaagtactcctcaaactatcttacagtaaaccttcatgagcttaaagagataaaatcttagctggaagtagtagcacacgtgtttaatgccagtacttgggaggcagaggcagggggatctctgtgagtttgaggccagcctggtctacaaagcatgttccaggacagcaccagggatgggggtggggggcagagatctatatttagatcctatcatatccctgaagtctattttggggagagtagtgatgggtatacataaccaatacactttcttctgaaaagctagacaacagcaaacaatgtgttacagaagtgatctgtcctgagtccactcctctcagataaagtcacactgtgtatgcgggggttgctgatctgatctgtttttaagactcagaccaggtgacctgtatctactgtccagttactccgaaagctgaggtgaaagagtgcttgaacccatgcctgggcaatacagtgagacctagccctgtaataaataaaatcacttcattgctacctggaattatgtattggtctaagctcgtctcaagcaggacatgtagctcagtggtagactgactgctcagacattctacaacactaggaaattcaaacataagctaaactctgatgtgataaagacaaaaattacgagcattttctgagaactttggttgtagggaacagcccactaattctttcaactctaactcatccttttaaaatataaaccagcagtctacaacaacttcctttactaattttcctaagttgaacaaatgtgaaagggacaaaacccataacagcgatgtcacaaagcaccaattgctttggctcccttttcttccccaccttaaacccatcgcattgaaatacaaaaacaaagttttaggtaggtggaattaagaatctactccaagcatttctttaccctttcccactgcaaccagtatttggaaaatgagagttcacagaccccttggagactcctgttgagaaggagtatctggtcctcaagttctttccaaatccacataacgaagccattagctagcaaagcacacacaataaaacgaaattctgaaaaacgaggttcgcacatgtgacctagaatcaagtttcctccctgccgtcccaggcatcttctttccacacttcagcattaggcgacaaaaagacacaaacatttttacctctaaaatcaccaagtccacatttccaaaggcaccaatattgtcatgagttaaaaacaaaaacccacaaagtggtattagagctgaaagacgtacttttgtgcagttaaagcattcaaagcatcagcctttattttgtgataagtttattgaacagtatccaagacttcttctttatcaacaaaaactgctaaatgatgccagaggaggaggtgctggcaatgctgtggtcacactgtcaacagcctcttggctgtactgaggttctaaagtttggactacagaactgccaataaaacagctggaggaaaataatttacacatggcattgtaagtgggaaaggactcaaaatgatcacctctagaaactctcccccaaaatggactagaagtcattttacatgttcttcactcatttttccagtgcttttaaactgagtgcattttattttcacacttatacaatcacagaatccagtaaaatggagtttgaatgagcttttgtgtttccttatttttgtgcaaggtgatcatttcctccaaaattgtgtatgcttgcttacttccaaatatgtacatattcctagattttcatcaagtaggtcaagactgaccttaactacactgaatattactatctgtaagtttgacatttcctagtgcaggaactgcatttcacttaacactgttgcattaaaacaaaacccacaacagccactaataattgtacatccaaactagtataatcacagaaaacacctccaaattatgcttatgagctaaatctgtcactgaaaatttacagatttgcttatttataaaatacatttgtaggtttcactaatcctttaaaatcaaaagaaaaataaacaccaattaaaaactcaggagaaaacaaattaaacctaatggaaaagattctcttccattaatgtcaaagtcaccaaaaacagtaagatttacacatgaaattaagaataccttgacagtgtttacaaacactctttgagcaaagctttacaaagccttcatgccatacagatgagaaaaatcaagtaaattcaatctataccaaacctagttctggagaaaatttgtctgtcgagaggtatgaatagtttcatggaacacattttcatggttattaaaacaaaactgaaacttcaatgcccagaacaagataaaacaatatactcagcagttaggtctgttaatagtttcagttatacaaaaactgaagttccagacggcagagttatttatatttagtcacatttcacaacaagcactgttgtgatccaaggagtgcagaacacaattctctctgatttctacaccaatactatgttcttaatttatttaatgaacagtgagatccaagcttttctttttagcatttatctaagatgtagaaataacaaaacagttgtaaatgagtgaacgaaatatttggtcagtgtgtaggaatatacaaccaaaataacttgtgagaaaggataaaagattttcaccttccaacaacccaatttttctaaaatatagacagctttccaatgggaaaataacctgcagttgaaatacgatgcccaagtagttctgaagtttagtctttgggatgagaaatgattacttaacacaaaacatcacatataaacatattgctttttgaggcagtatctatctgtcaagcaaattatatctgttgagttactaagtgattaacaatgcagccacttctttccaaagtctgcacaatcctttccctaaacaaaaactccacactatcaaccctccaagactatactagtgaataggctttccaaactttatcacaagactgttgccattcaactctagagttacacgacgaaactgtatttccgtgttccactgccttagaacaccaaaaaggcactgtgtatagacatacataaatgtctgtgtatatttatgtgtatatgtatatatacatacatacacacgtattcatatataagtatataagaaatgcctcttttaaaagtaaatacagacttgtaaataatgttggtgtgtttcaaaccaaagcaaggtcatatgaaagataaaattgatttcccatgattattcattaatttccaattctgtgttacgttaatgtgaaacagctttcaagcattttaaattaagaaaccaactctagacagagccttaagtgtcagtgaacaagatgtgataaaccaaatacttttatggaaaggatacttagccaaccaaagtctatgtgacccccccccactttggtgccttgattgccaacaggaaagaatatgaaaacgcaatgagtgacctcagttctcttgtccgatagctgtacttgtactttgcataaagaatattagtgaacaggctcatgatcgaacaactacaccaaaaagcctccaagttaacagaattaaacacacatcaacctatggtccaacttagggatcttacattctacaatactactgctaacaaaactaccaatttcaacttcagttttaaacccccaagatagaatgctctttcttatggactcctttgttccaaaatgtcacctaaattggggcaaaagccatttgctaggttagtccatcacagaaaggacttcaaatcaaacacctaaacactgattaccaaagtggtttctggttttcactgccatccaaacaatatgaacaattttaaacgtactaaactaataaaacttggcggtcaaaccaaaaaaggccagtagaggactacatactttatttttatggtaaaagtcattccacacaaccataagtgtgacattagaaatcaaagttcagggttatatagcacaaaccaagtgtggagtttttatattagaaattaattaaaaacaaaatagttgtactcattacaagtgagtcaattaggcaaataaagtggcaacatctgaagcaggactgtctatacagcaagaaccctcaagaagcaataaaggtacatacaatgaatccatatacagactttattcaatttaaaaagaaaatgtaggttttagacaaagctttgaccctataacaaagcaaatatgtccaactttaaatcgaattgcaaaagtagccaacttctaattgtcagcaactggcaagagcaccctcctcgagctctacttatgtttctattttcttcatcccatgtggtataaaagaaagccaatctagatttccttgataagctttatatgatcatagttttagaaatggtttccactggtatgccaaaaattatttttgtgttctctccagatagctttacgaaacaaattgcaatgtttaattctgtgagttgtaaacagccaaccaatgctctgtgttatagaaaccaatctatctgcaattgaaacaatccacaggctctaacctggaaatactatgaaaacaatctggatgcattaatcacagcaacatgaagatataccctataatgtgaaccactatcctaaaacgagctttacctttcttgaacctataggtctatcatttaagtcaatgacagcagctgtggcttcgtcccgagattcaaaggccaccatggcttcacctgtaggcatacctttttcattgtattttaaacacactgaacctgggattacctgatacccataaaagaaatctaaaatttcatcaatagatacagtaaagggcatgttctgaaccttaattattgtaggtcctggttttccagagctagctccaaagccagggggacccgcaatatgtattgggccaggcccaggcccaggcccaaaggctggaggcccactcaaatgcccagggacacttccaagactagggggcccacttccaaaaccaggaggagcatttaaactaccagggccatttccaaaattctgaggaatgcccccaaatcctgacggcccacttaaattatttggtgctcctccaaaacctggaacttccagtcctaggccaggcaaaccactgtttccaactgaaggcataacaggcctaacatcaccaaaagccccccctaatcctggagggggaagtggtggcccaaaggcattcggcccgccaaaattaccagggaaattaaatggcggcccattattggcctccttcgatcctacagtcaagaagacatgctcctctcctcctgcagtggggatgccagcaccaggcagtgcaggaccaggtattgcgggaccaggtattgcggcaccaggtattgcagggccaggcattgcaggaccaggcattgcgggaccaggtattgctggaccaggcattgcgggaccaggtattccagcaccgggtattccggcaccaggcattccagcaccaggtattccggcaccaggcattccagcgctgggcatcccagcaccaggcattccagcagcgggcatccccgcactaggcattccagcacctggcatcccggcaccaggcatcccagaaccgggaattccggcagcgggaattccagcagcaggcatccctgcactaggcatcactggtactgcaggattacctggaacaggtatctttaagcccttttttccttgggctgggggatttttctcaatctctcgcatatcttctagggtaactatatggacaaaagcttctctcccattcagctttttacggtgtaagtgttcagatttacgtgcatcatcttcagttttaaactgaaccaatgcctgcccaagaccttgcccattgttatcaacaagaacatggacagcactctcatccaccgggattccttctaggaactgaagaacgtccatcttggtaatgctgaatggaatgtttgttatatgggcacagactttggcagaactgacatccccctctggatttaacaccatttccctctggtcatagctgaagttttgaagtcgttttcgaatcatatctatcttttctagcatacctttcttagtaattggatgaacttgaataaagcgattgcccatgtattgtttatgacggcacagagcagccttatagtcagcatcattcctgaattctacaaagccttcaccagttgctttcccattgggtccataagctatataaatactatcttccacaatatccaacttcttaaaaaaatcaatgacgtgtttgttttctgcttcaaatggtagcccttttaagtaaacacaataaccagcctcatgtggtgatcttgaccgtgaccttttctgcccactgggcgattttgaccttggaagtgtctgtggaggggggtgggcttgtccagaaggccccatgctttgtttgaaagtgatatgacctccagcagctacccactgtctctctgtggcaggactgacttccacatagcgttgaatcatcagcattctgttccgtttcaaagcttcaaatgtatcttgaggggagagaaacttaaccaatccattcccattatttcgacctacatgatcttttaacaaatgcactgcatcaacacggagcccatggaaaaactctctgacatcattttccattgcagaaaagggcattccgtgcacactcacatacagatcatcagggttgacgggaagtgacttcacgctgctttgagagttcatctggatagggttaacaggagttaatggacccagaaacacagggttcagattattgttcagactcataggtgctccagagccattcattccagcaggtagaggtgccacaggtggtggattcaagggtggcatgcctgacatgggtggcaatggggtcataggaggcacattagggactgggggaatgggagggacaggaggcacaggaggcaatgttggtactggaggaggaactggtattggggggatggatggcagcggtggcaaagatggcattgctgggattggaggaatcggtggtggtgggactgtgttcattggagaagctgtactcggaatggtcgagctgaaggttggactcccaaacgaagtccccatacttggaggagcagatcctacgctggctgtggaaaatgtctgtatatttttgttgctctcatgaacagaagtggtagcagtaactacacttggcgaaggattattaaagttgggtactgttgccggcaagtttaccctgttgctcatccctgagctaggtggtggtcctgatctactagcatttgctggtggtatatctaagttggcagtttcaaaacgcctacgactcagttcaatcatattctgcatttctgttttactactcaataatagtgttacttttgaccctttaattgtaccacctgtgcgcatcataccaagccttgcatcttcatcagtggcaaaaacgatgaaagcctcacccagttcaccccctacaatatgcacgcccccatcagggatggtcaatccagagaagaagtggcgaatgtccatggtccccgccacaattgggagaccttgcaaacggatgaccacagccatgctgcgctgaaaccacacacacctgcagatgagaaaaggcaacggccatgtcagactcctttttattacactgaatttttagttgcaagaatgaccagctaccatattatcccataaacattccctcaagctatcacaatgtctttaatttagatctgaacaattacaacttccaaagactttaattctagagtcagttatagagaggttcagtccaagactcaagaaaaactatgtaacaataaagtcatcataaaaactatgtaacaataaagtcatcataaacattcacagcactaaaacttcagtcagtgagatttaaaagaaatgcataaaaatctatagaggggaatcatgcaaaggatgcatcaaaattaatatttaaaactgatttagcatctttcttttaaactttacaattttatagttttatcagagtgataccttataaggctcaatctcaaaagccaaaagaaacagaaaactggaatgttcctggattacaaatacctattgataattaggttcatatctcaaatgaaagacatatctcaaatgtgaaagcattcacaagacccagttcaatacgtagcaccagaaatctcaaataacaaattccatatttcatagtaaaactttcgatttgttctataaaaacaaagaactatctggggctgtgaagatgattcagtgggtaagagcacattctgtatgtccaactgtaagaacatgagttctatcctgcatccacatgggtgtggctgcacacatacatctgaaagtctagctggaacccccaactgtcagcctagttccaagtatagagaaagatactctcaagagaataaggcacagaataatggaatgcctgacacccccttccagcctttgcctgtatacacaggcttatatacgtatttatgtatatgcacacacatacatgcatgcatcactcataaacactctttctgtatttattataagcaaagttaatacatattaagaatccaaagaatactaaacagaaaggtcaaattctgaattaaccgtaatatatcaccctaaaatggaacctatcatacataccattattcaccatggctatttaaccaaaactcaggtacagagactgtatcaaactctgcattacatctttttttaaccactttttataaaacaaacaaaaaaccccagagccagatactgtgggattccctttaaccccagtatgtgagaggtggagttctatgagtttgaagtcattctgactacaaagagctccaggccagggagagtttcacaatgagactcagtttcaaagaaataaatatcagttggcagaatgtttgcctagcactcataaagctctaggatcctcccctaattctatataagctcagtagggtggtgaatgtcaattaccccagtacttgagaggttgaggcaggaggatctagaattcaagagcaacaccacagattacacacattaatgtataattcactatttgggcatctgacccaacttaactcctgttgaatctctggttgctcactgatacccttatacagcaaaacctgtctcaaaaaataaatgaaaggaagacgagaagggggctcagtgagatggctcagctcactgacaatactgaagacttgagttccatccctaggacccttacagttaagggagagactcaactcccacatatatacccacacgcacaagtaaataactgtaaaatattaatagggttcagctggagaaatggctcagcagttaagagtgctcactatccttgcagagaaactgaggcccagcaccctcatagcagctcacaaccacctctaactgagctccaggagatctgatgctcgtgtctgtcctccaggagtaccagacacatgtggtacacatatgtacatagcgaaatactcatatacacaaaataactccttaataacagtaacagggcagacttgggaggcagaggcagacaaatttggctgtggtgacctacatgtttaatctcagcatccaaaagtcagaggcaggaagatatctgtaagcctgaggccagcctggtctacagtgagtttcaggacagccagagctgtatagtaacaaaaaacacaaagtagtaataatatgggctggaaatgtagcttagttggtagagtgtttgcatggcatccatgtggctttgggttcaatcccatcagctcataaactgagtgtgaaggcatatacctgtaatcctagcatgggagggttagttacaggagggtcagctcaaagtcatacttggctactaagtcaatttaaggccaacttgacatacatgaaattgtttcaaaataataaagggactggagaaatggttcagtgattaagatcacttgcttttacaaaggatccaggttaagttcccagcatccacgtagcagctcacaaccacccataaactccagttccaggatcttcaacaacttcttcttgccttgctaggtacatacacatacatgaaataaaaataaaattttagaataggggcagagagatagctcaacagttaaaagcacaaactgttgttctagggaatcttagttcaattctaagtatcatgttgaaggcatatagctgctttcagccagtcccaggggtcaaatggcttgcacaagtacctgcactcacatatacaaaaaacacagacatacaaatataaatctttaaaaaattgtatttaaatatttttgaggaggggctggagagatggctcagaggttaagagcactggctgttcttccagaggtcctgagttcaattcccagcaaccacatggtggctcacaaccatctggaatgagatctggtgccctcttctggtgtgcaggcatacatgcagatagagcacttgcatacataaaataaataaatatttaaatatttttgaatctggattcaagattttcaattatttattaatacattgttcctgttgccattgtggtacctggtagcattaacactttagttttgggttttgtttttttttttttaattatttattcttaggaacattttgcctgcatgtatgtctgtgtgagggtgtcagatcttagagttatagacagttgttagctgtctatagtttagcactttagcactttagttttaaaggcttctacttttaatttttttgtttttgtttttgtagacaggctttctctgtagctttgaagcttgtcctggcactctgtagaccaggctggccttgaactcacagagatcccacctgcctctgcctcccaagtgctgggattaaaggcctgtgccaccactgcccagcaatggtttctccttttatgaaatgttttggaatcaaattttggggactggaaaaatggtaattttgaaagtaatctgatcaatcaagttttaaatataaacctattaacttggttctgagtcctcagagaaatttcaattatatgcgtgatctagcttaatcacttctcaagaacattagaaaggacaagatttcctgctataagctctaagacttaatacaaatcaatggagggaattcttcaatgtcaaatactatacaaactataatttaatgtaataaaatctaattatatcacgattttatgattactgtgtgcaaaatagaaatatggttttgatggctggattttttcctatttgtttacacagacacacccctgttgttgtttttttcttttgagacacggtcttactatgtagcctcagaaagcctagaggtctccctaaggagaccaggctgtcttccaaatcacatagactacctgcctctgcctctacctcctgagtgctgggattaaaaggcataccaccattcctggctatatgttctattttaaagctttctgggcagccaaaaacaaaaaacaaacaacaacaaaaaagcccacctcattgtttactatacctgaagaaatttcaaaaatcaaacataaccaaatggtatatttaaaatcacattctatttgtaaacagttaatttaaaagctactgacctttgcatcttaggacatacacagaaccaacacaatgaaatgacaaattctgcactgataacatgcttactggtttccttgctctctcctctttgactacgcaagtatgatttccttatttgagacaatgtctcatgaagcctagcctactcataaactggctttgtaaccagaggaccctgggttctcttgcctttacctcccctagtgctgggatgtgctacctaatacccagttcatgtggtaccggggggttgaaacaatttgtgcttgctaagcaaatactctactgacttacattctctaccccttcatagctttcctcacacaattacacacaaagataaaagcaatcttcaaatttaatcaagaatgacggactagcacctagaacatattttataaggctatacagagcactagaaatggaggtagaatgggtgagtaaagatttcaggtatggacttcaagagtcaacaaagagggctggtaagatgatggctcagatagtaaaaacctgagtttgacctctgcaatctacatggtagaaaaagacaactgactcccacaagctgccctatgacttccacaggtgtcactgtgagcgccagcactctcagaaacacacacgcacaactacaaaagagaaatagaccaatagacttaacaggcaaatgtaagtttaatcagaacatttccaagtaactgaggcaaattcacattccttactgaatcggaaacatgtttaagtgaaaattgtggtggcactcttttcaacttcaaaaatatgttccatcactttctatagaggaaacatcataggtaaaccagatatgcaatacctagggaaaagatactttcctttgtaattgaagaataagatgagaacttgaaatggtcccaatacacagacagattaaacacaagcataaatgacattcacagtaagtttctaaaccatattgttaagagatttaccaaaagtcggtacaaggcatccatgaaaacattccaattattaataacctgcctaagactgccagttggaaaagggatggagaactgaaccaagcagagtacaagatttgctcctaaagctatctgacaacaaacactgaaagtatgaagtgacagctgttactctgctactaagtatctaggtatctgagtgacagcaagtcttaaccagtcttgagtcaatgaaaacattaaatccaattgctaaggtttaaaattcgcactctacaaacctaacatctacacctgtatttctagggaatataaccatatcaagaagcactgaaatccacaatccatctgtaatgctacaagggagggcgcaggagcttactacctagcaataagaaatacatccatataaataaaacactttcagaggaggaaattattcatcccaccctatccctcagataggcttctaacactaacacacacacacacacacacacactcacactctgctatatttattttcttatttcttaataaggtatctcattttattttgcataaaaataaaccttctattcaaaatctcttaccttgtaaaacaagagatgtattttcttaagaagtagaggccaagtcaatcctgtgggcaaccaattaaaaccaacttttagactgcaatagagaataaatggaggcaaaaaatcaatgcaggaaacaaaacaacacacacaggccacactgcactgtacattatgaaggagtctgacaccagtggagtacttagtaagaatgtatagttttgttgttttttaagaaagagataccaaaatcccacacttgctttcaagtctgagaaccattctatcaaaaatatgccatcaggtatttatataaatatgccatgtagccaaaacataaatataaaaacagtacacgctcagcttcagatggtaattatcactcaatgtttatacaatccagaaatgccataaaagtctattaacatgtccaacctcaacttatttcctaagttctcaccaaacttctgatgaaaagcaaatttacataataacaattcctgaactgtcatcaggtcagggatattcacagaaaccactataattactctttcaaatatattacctttgcatcaaactatcacaggtcacaatacaactgaaatcaaatttcagtctctaagcactaattccactatattcaacagagatttctttgaacgtaacaacaaaaaacttatttaaaaagttatctaaagcatatctgtaacctcagtcagcatcaagaagcaggagctgaaatactacttaagtctgagactaacctgggctacatgctgagttctaaggccaacctaagccaacaggaagtccctgtctcaaaaacaaaatatttcttcagcaaatgtctaaggacataataatactttctaaatcacaaacggggtagcagagtacttatctttcagagtaatttcttctgtactagtgaagttattaacaattcgcaagcaacacaaacaaacaaataactgactatatttcctttttttttaaatgtacctagtctgtacaccgtgagcatggccagtgcccagggaccagaagagggcttcagattccctgagactggagttacacacagctgtaaactgtatgtgggtcctgggaatcaaacccagatcctctaaaaggatgccagtgctcttaactgctcagccctctcttcaaccccctgattgtgtttaaaaggtcattttaaaatgcatttttaattttaactgttttggggggctaagtgggtgcaaacagtcccagactgaatctaagcctaacatattttaggcaagccctctaccactgaactctatcctcagctcaacatatctaatttctcaatttattgtacggacacatgcaaacatgaatgtatgttatgtgtatgctgatatatatatatatgccaaaaaatgcatgtggaagctacacaactctgaaagttgtgggtcccaggactggaactcagttcatctagcttggaatcaagttgaatcatcttatcagccctattattttactttttaaatcaggctggtgatgcttctggctcaaatacactagttgttcatttttgttttggggacaagtgtcaggtagtcaaacctagtctcaagttcaggaagtagctgaggctggacttaagtactaatcctgtctccatcccatgctgacgcctttagtcccagcactcaggaggcagaggcaggaggatctctgtgagttcgaggccagcctggtctacagagcgagtgtcaggataggctccaaagctttacagagaaactctgtctcgaaaaaccaaaaaacaaacaaaaaaatctgctggacgacggtggcacacacctttaatctcagcacttggaaggcagaagcaggtagatctcctcgtctgaagccagcctgttctacagaacgagttccaggacacccagggctaacagagaaacgggtgggggggtggaaatctgtgttcttggggaagtcagaagagcatcttgggtttcagtccttgcctttcaccttgagaaagagcttctttgtttgtttgtttgttttacagctgcaatatatcaggctagctggcctgtgaacttcccaaaactgtttctaccacccatctccccataggagcactgggattacagatgtcattatctctcttttctttacatggactctgagaatcctcatacttccacagctttatgaactaaaacaccatcccagacaagcaaccatctttaacttcagagagtaagaaaaccctaccactctctggtactaagattaccaacaaaatcacttatctgaatgatgatactcattgttaaaatactgtgagaccaagtaagccacagtaataattttttatcaccaaaaagtaaaacaaggcaggcagtgctggtgcatgcctttaatcccagcactaggaaggcagaggcaggcagatctctttgagttcaaggccagccttgattacaaagcaagttccaggacaggttccaaagctacagagaaattctctctcgaaaaacaaatcatgttattctaaacttgtctagaggaaaaagcaaatatcttctaacaatttaaaatattatacaatgcactttgccaaaaaggccaagcttttaaaagcctaaagtgcatacattaatctttagaatgtaaaaatctaactgaatataaatctttgtcaaatcactgtgtacatgttcatgatacatgtgtgtgcacatgtgccatacagaactgtgtggatgtaagaaaacaactccatggagttgaatctttccttctaactttaggtgagttctagggatgtggcaagagccttttaccttctgaacaatcttgacagctatgttttcttaaactcttcatttaattagtcttatttccttcctttattgatgtgtcagaaaaaccacaacgtatgtgtgtggacgtcagaagacaacttttggccaggcatcagtggtgcacgcctttaatcctagcactcaggaggcagaggcaagtggatggatctctgtgagtttgagaccagcctggtctacaagggctagttccaggacagcatccaaagccacggagaaaccctgtctcgaaaaaaaacaaaaaacagaggacaacttttgggagtcaatcctctccttctatgtgggtcctagagattaaaattaggtggtcaagatggataacaagtacttttactcactgagtaatctcacagaccctaattaaactcttcattttaaaagttgtggtggtgtatacctttgatcccaacatttgggagactgaggcagacagatctcctgagtttgagaccaacctgttttacaagtgagttgcagtacacttagggttacacagagaacctgacttgaaaagtacaaaaccaaaaactgtacctagggaaacagaaaacagaaagtttgcttcaaataaagcaaaaaaaaaaaaaaaaaaaaaaaaaaatttttttaaaaaaaaaaaaaaaaaaaaaaaaaaaaaaaaaaaaaattatggcaatgcatattatgtctaattgcataaagaatcagccttaagagctatagaaccagagtaattttgtagattggttggttggttggttcctaaacatctgacacctactggagatttaattccaaaggtctggcacagcagggtgtggcagtgtatgcctataaactcagtgctccaagaggcaggaggacactcagttcaaagtcagcacagacaacatagagaattcaaatccagccaggatatgagaatcttgtctccaaaacaacagagtaggaacaaaacagaaggcaagggcctgggcatatccccaaatattaggaactgagtttcctaatgcttgtcttccctttcagacacaagacattccacatccatccagaaggataaatttaggtcagccagttatgcccaaagggaactcccatatctacaaggttccaagaaattaataaggaaaattcttattacatcaagaaatgttgaaagcccagctaatctcagtaaatgtgtacttcaaattttgtgttcaactttacagcacaaaaatcaatccccacacaagtaccatctgaagcatccagtgccaaggagaattgtacacctcagggctaaataccacaactgcagaaccttttctaccacagctcttccttcacaagtacaataattggaaactgaaaatttgtagcacttttgtttcaactcctcactttgtagagaccagctttgtttatcagttcaaaaattatttgtgttattcgccacccagtggtggcacacgactttaatcccagcactcaggaggcagaggcaggaggatctctgtgagttccagaccagcctggtctacaagagctagttccaggacagcctccaaagccacagagaaagcctgtctcaaaaaaccaaaaaaaaaaaaaaaaaaaaatgtgttattttatgtatatggatattccgcctatcacatgcacaaagtacaagtagaggccagaagggggaatcaggaatcatatcccctggaactggtggcacagcacagatggctctgggctgccttgtaagtcctaggaattgaacaaccctggtcatctggaagaatgaatatatatatatattgattgattgctgaggcatctctccagccccaagaggtagtactgttttccaagaatctacttgttcctatatgttaaaatatatcagctagtgcctaactgaacacaggattccaaactaaaatctatcccactcacctgataatgacctttggaaggacgtgagtgaaataatactatgcaaaatacaaacaaccgaaaaacagtattgagccatatgtgatggcatgtgcctttaatcccaaagctcagagacaacagtcaggtggatctctggtgttctgaggccagccttgtctacaaaggagttcaggatagccaggggcacacacttatctcaaaaagataaataagaataggtattgtaacgagacaatgtacacatgcaatgctagcagagtacttaggaggcagaggaaggaagactgagagtttaagataagttatcttataaacatacacattttatctatatagagagacaggcaaagagaaaattgaccctggtttgccactgatccattgctctagtttaaaatacctaaaacaagcttgtttagtgtatttttcatttcatttcctaacatatgttgcttcaatacaataccagatacaaacacaaactaagtattttcgtattatgacaagataaactttaccagccattccaattatttgaaacttcaaggtaaaatgtctatcaacaaacctttccatcatgaagaaaaggtataaactaattctccagcttttccactcttcatctggcaataaacactgagaagtgaattttcactttgttcagtcacaatctttacattacaaaggaaagaaaaccccagtaaccccttaaatgttcactttagaaaccagcaagttcctattgaaacaggcacaatgttatcagcagggtaatcgcatcacagacatcatgaaaccacacttcattccccttgggtttgtccccatcaccaaataaagcacacttcagatcctgggaccactctaatgaatacactcttctgacactgataaaatgtgtaatactgaattttcacattaacttcccatttagtactcataggcagtaaatcaagacattcgaaataagaagtccctcctgtcgaaaagattataatattgttattattgataccaacaaaaatgtcctctttaattcatttgtacttcaaaacaaaaatattgcttctagcctaactaactacatatctactttcactatggctttaagcttaaaactctacaaaccaaaagctacataggttagaactacaactattagaactacaagtgaaattatttttttctgtgtagtctacccttaaactttttacaggcattcatttttgtgagttttattaagaatatgtagactagggctggtgaaactgatcagtggttaagatctctggctgctcttcctgaggatccaggttcaattcccagcacccacatggcagctcacaaccatctatatgtccagttccaggggatctaacaccctcttatggcctctgaggtcaccaggcatgaacatgaaacatgtaggcaaaacacccatacaattaaaaaaagtagactaggcattagattttaaactggactctacattttagggaaagtaattctaaacatatatacattgtgcaaccaattactaacattttcagaagaaatcactcgttcaaactaaatattcccagccaactattatcccaatgactccagaggcttaatagttcaatgctagcctaagctacctaacaagatcctatctccaatgaggaacaaacaaagactatcagtactggcactgggttctagtatctggcccacagtacaaaagagaagtataaaatgaaattttacacctaaaaatagtaccaagaagtccaaaactttcaatatgcagtcagtcaaaacattcaatgtgtcagagaaagagaaaaagaagcctagagtagaccagaacagtagccaccagtggtttctaaagtgtcacatattcacttgacagatctgaacataaaatttaaattattcattacaacccatcgaacaacatttaatcaagcattaggtaatataaaaatgtagcacgttttgataaactacccaataaaccctaagcacagccttgtgaactcacctaaatacatttaatttccctcaaaaattacattaggaaagttatgtgaacagatcttcaatttttaatatccttagaaatgtccagacacagtcactttccattaaacccaaagtctcagtctcaacaaaagtaacaaattttcaaaaacaagaacaccagtttcgtatttctattaattttagtaaaggtttttgtagaatttttttccaactgcaaatgctcttaacactgtaacagtatacactgctcaacaaggtcccgaacaatttgtttctcctaagactgaattcatcaaaattaacatttccaactatccaagaagcctgaagaaatagtccactcacagcctctcccttcaaatcctagtttttcccaccaggttgtgtaggctggtatcaactcaatcttaaagaacataagatgattgttgccaactgcacacattcagtcttctctgtcaatctaggagtcaagaaggctttaggacccagaatacagcaacacagcctgtaattctccacataccctatctaccagaatgaatgaatcttttgcactgaattaaccctaagtagaccactcgggagtccctcaaacttttcactacatagcacacgcacgagtccactcgcttaccaacgggcatccaaacccgctacattactccataccccgtcactaacctgtagatccttaagggacttcccatctatttcacgcggctgcaaactagcgccgccaaccttcagccagctacctaaggcacccatcatccttcctccctgttgctccccccgcccaaaggtgccgtaaaggtgttgcagctagcagccccttccctatctgggtaccaaggacctgccatccttgctacagttgagacttcaccccttcctccttagctacagggcggctccagattccctacactccctagtaagaccctccttagtgctggtcatagacagcacttggctgcaacccgttgcaccttcaggtcctgaaggcggcgggttcctggcctccggggcgagcttcctcctcctaggtgtccctaatgtggtcccctttgctggtcataggccactgggagctcttcactttggggcaggggtgggagttaaaacctcggccccgtcggaagcccaagaagccctccccattctgcgtgcaggcgttttcatcgcaacccccacgccccggcagttcgcaggccgcgggggccacccagggccggccgattgccctctcaagaccaccggggcgtccccgctacggcctggagcccactgcggcacgccggctccacctctcgcgtcctcggaggccgcagagtgtaagcggcaccccaggacccccgcagcctcgccgcgaccctttgtgtagggtgctcgcggccgcgggctccgaggcctgggaaggccccgccccgaggcaccgaggaggcggctcgagccccgcacagccccgcccgtttcggggctgcgggagtcttaccggggagagcttgcgcggcaccagaacccagacccgagttaccccccgcgcgagtgcctcagccccgcggccgacagccccagcccggacggcttcccggagcccactgcagccagcacctccgatgccgcctcacaaaatggccgcccgcccgctcggcggctccgcgtcccaggagggggcggggggggggtgcgacgtcacccggtgggagacgcaggcgcgctgaggtttgggggtaggaaggggaagcctcggaagttgcaggtgtttgcggcgaagggggtttcttaattccggtttgtggagtttgctcccgagccaggcctgaagctagtgccccaggttctttgcagggcctttgtgcaggctgctttgaacctctgtgaaaggagcgaacagtgcctaccttgcacaactgtcttgaggttaaacggaccaaaattgtagctttgattagactctgccgagcaaaaaaagcgtggtggttttttgtttttgactattgaaaacattcggccttggggctggagagtaggctcagtgggtaagagttcgttcgtactgctcttccagaggtcttgaattcggctagcaacatcgggtggctcacaacctcctgtaactccagccccaggagatctaacgccctaccctggccgccgaggtttcctgcactcatgtgtacataccctcattcacaaacgttaataaaaatgaaataaatctaagccggacgttggtggcgcacgcctttaatcccagcactcgggaggcagaggcaggcggatctctgtgagttcaagaccagcctggtcaacagagcgagttccagaaaaggctccaaagctacagagaaaccctgtctcaaaaaaccaaagatagatagacagacagacagatagatcagcctgatctacaaagagttccagaaaagccagggctgttacacagagaaaccccccctgtctggaaaaacaacagcaaaaaaaatgttcaacctactgtggcaacccacataatcccctgtagggagtcctggtctgcaccagaccctgtctcaaaaatataggactaggtgtggtgcctcatgctcctaatcccagcatatctgaggcagaggcagtcagatctctgtaaattccaggccaccagagtctacaaagggagtgtcaggactagatagtaagattttccctagggctggggatgtagcaggcagtaccctgtgtgagtagcatgcatgaggttctagatttgcctcaggcacaaaataagcaaatgtggtggtactcacctgtaattccattatataggaggtaagacaggggaatttagagcccgctataacgggtgagagactcctgttgcaaagtctgagccggacagtagtgacacatgcctttagtcccagcactcaggaggcagaggcaagcagatcaaacctatgtgagttcgaggccagcctggtctactgagcaagttccaggacaggctccaaagctacagagaaaccctgtctcaaaaaacaaaagaaaaattaataaataatttatttttataagcattgattggtattttgcatatatgtattgttagatttttgttgaaattagaaataaaaggggagagcacaagatgagacatgttggacatattaactagtttattataggtccggcagagtagggagactaatagagaagaggaacagggttaatggctgaccgccatggctggtcgcgagaggagagcgagagagcgagagagagcgagagagcgagagagagacagagagagagagggagagagagacagagagagagagagagagagcgcacagaggagagaagagcaaaggaggagagagaagagcagagagtagagatcataaatgggcaggggtctgtcttttaaaggggtcctctgcacctgcgtgcagacttggttcccatggaaccctggctgaccagggtactgcctgttctaccaggtaacagggtcaggccagcataatgcccgaacctttcatgtctgcttgtgtgaggatgtcaaatcccctggaacaggagttacagacagttgtaaactgccacgtgagtgctgggaattgaacctgggtcttccaaaagagcactcagtgttattaaccactgaacactctctctggcccccataaaatacatcttaatattgtcttgttacagaaaaaaaaaaagaaagaaaacaacctttctcagattactatggacctagtcttcatcaatcctcatccctccacttcctgctccctaactgtaccctgtatctttttcttggggggggggggtcagaggttgcattgtcttgacacaggatctcatgtagttcaggctgacctggaactatgcagtccaggatgtccttgaatttctggtcacttttcctcaaactaccaagtgttggggttaaggcctatcccatcacatccagccttttgtatactttgtatctctttgttaaagacctgggattgaacgcaaggcttgcacaaactaaaccagtaagtactctaccactgagctacacattctcagccctgcactttaatgaaagtctctctgtcatggatctagtcttctaaatcagaaagtgaagcattaatttaccaacaaaatcggagcctaaactgagtagtggctgcacactcctttaatcccagcgctcgggaggcagaggcaggtggatctctgtgagttcgaggccagcctggtctacagagagagttccaggacagcctccaaagcaatacagagaaagcctatctgaaaaaaataaatgcccccacgggaggggggggtaactaacaaacaaactcatgaccacatgtccctgcaaccccaggcccctgccctatcttgcttaaatgtatcttgcttaaatatatggttattgctttacgttgtactttatgtaacaaccttgagtaaccatggaaacttgtaatcttgtggctctaagatttgtggtcattgcctgtaaaaactttcctcaattgttggtagatacctttcactctcacaaacatagaggtccctgacggcttgaacaataaagaaatcttcgcttttgcatctgagaatctgctccttgtggtggtctatttgaggtttcaagaacctggcataacaatttttaaagacaaggtctttccgtgaagttcactgaaggagtttaccagtttggctttttttggctggtctgcaagatgaagggatcctattatttatttcctttttcttacccagcactggggtgaaggctaagccgccacactggctttttttacttgggttctgggaactaaactcaggtcatcaagcctgtgggaaaagcccaagaaagaggactgttacaacttggcgggcatcctagtctacagagtgagacacataccatttaaaaccagaagagagttgtgtggatgtctcatcctaagcaagtaaattctgaagcaactactctcaaaagtaaaccagttccctctgtcttactacaaactattagattacattactgaagcaaggccccaaggcccattcccttgtttggccaacccctccccctgaggctaactaccaaggtcccacaataaaagtgttgaaatccagcaatcaaaagccccctttagggttggagagatggctcagaggttaagagcactgactgctcttccagaggtcctgagtcaattcccagcaaccacatggtgactcataaccatctggaatgagatctggtgccctcttctggtgtgcagatatacatggaagcagaatgttgtatacataataaacatataataaaaaaaagaacttaaaaaaaaagccccctttaaagccgggcattagtggcgaatgcctttaatcccagcactcaggaggcagaggcaggcaggtctctgtgagttcgaggccaacctagtctccagagcgagtgccaggataggctccaaagctacacagagaaaccctgtctcaaaaaaaaacaaacaagcaaaaagccccctttagcagggcggtggtggcccacgccttttatctcaacactctgtcggcaaacagatgcaggcagatctctgtgacttctagactagcctggtctacaattgctagttccaagacagcctccaaagccacagaaaaaccctgtctcagaaaaaaaaaaaaagctccctttggcccaactaattaacatgtccaattaaaattaaatatctcatcctaacatggggttccccttgtgcttttataaacctccattttcctatgagccaaatgagactgtttcctctctatccagaggcagtcctttgtcctctgggacaaatacccctccccctttccctggttcccttccccttctcccttttcctctatcttctgtctttgtcctgtatccctgcctctgtccctctatggcaaataaatctcctttggtctgagaatttggtcttgggagtcctgagcccatacttattggagtgtacacctttaattacagaaataaataagtgaaccagggccagtgacatggttgagcaggtaaaaaaacactagctatgaagccttgacctgagtcccaaaagccttcataaaagtagaactgactctccgaagctgtcctctaacctccacaagtgaaccataagtaaatacacacacacacagagatttatataaaaatttaatgtttgttttggtttttgaaacagagactgtgaggccctgactctggaattcgatttgtaaaccaggctgggtttgaacctactgagatcttcctgcctctgcctcccaagaactggtattaacagtatgcacaaccaatccagctgtttgtgttgctgttgttttgaggcagttatcaattatgtagttctggctggtttagaacttgcagtgtaaagatcagtttggcattgaaattagattgccagcctttgcctgagataacagacatatactttcatgccccatttaaaatcattaaaaataaaaagactcccctggcccttttttttgagactttttttttttctttttttgtctgcttacaggactgggcactgaactcagaacccaaaatgctctatgactgaggtatatccttaaccttataaaggcttaattttttttgttttgttttagataggtctctttttaggcaacactcttaaagaaatagaactaatagaatgaacatgtatatactaaaaggaattaattacagtggcttacagacaggcccagttagtccaacaatggctgtttccctgaaagaccaagaatccatgagacagaatgtcttttttttttttttttttttttaagacaggttttctctgtagctttagagcctatccttgaaatcactttgtagaccaggctggcctagaactcacagagattcacctgtctctgcctcccaagtgctgggactaaaggcatgcgccaccactgcccagccagaatgaatgtcttggtttgagatccaaagttacatttaagttttaataattctgcctaagagatccatgaaacaaaaatgcctctgatatgcaagccccttgcccaaggacagatagttcctaaaaggctggaggctattgtttatgggccgtaacaagccaaaagtgtcactcccctcaatgtttatttgacctatctgcaccaatgtgcttgatcacgtgcgtgtaggaggttcacaggctggaggaatgtcaggaagtatgcttgtccctgattggacctgatggaaaatgcactgaattatgggtttttccttcttaagccaatacaaactgattctgggccatttcccaggaacctgggtgtggacttgaccagaacccatctacctggccagaatttaattaaagtttgcttcaaatttggctttaaattgtggtagtggtcttattcttgatcagtaggattaacattaacagtgtcactctggtgctagagttgcaatgaagtcctggagaacttcagtctaattggaattcctaagaaaggtcctatttgctttgatttagcatagtttctttattgattctttgataatttcacattatggaccccagtaatttcccaatcctttcatcccttgcagcatctccccacaaaagaaaattttagaaaaatttaaaatcaaaacaaaccaaacacaaaagctctttgctcttccatctttcctaactttccagcacctcttcatttggtgttagtggtattgggagccatggtgttaacacacagtatactcttttgtccaatcagctttacctgcaaatgttcattgcaataagtcactggtctggtttgaagcctcaggtttctggcacaccatcatcactggaccctcaccaaaacacctcttgaatattctgctattgcccagagtcatggagatcctgtgggtaacattccccaggaccagccccttcacgagcatcagcagatcatagatgggtagatgttaggctgggccaacttcaggccctggatgggggcctgggtgctagctgagctggtccgtcctggccactggggctgtcccccactttgggcaaagggcaaacccagctctctctatgtacaagtcatggctagttctcccatgtccatggagaagggtgggaccattcttctgagtggaggggagaggcagctctctcatgaggggtaggaacagctctctatgcagtgattagctaggggcagggcaagttttcctagggccagcaaagggtagggtcagctcagcatggccctctaatttcatcaggcatggttcctatgtcccctgatcccaacccttcctccccatgataacatggaccacagacatcaacacagaccccaactgcaccaggaccatggacacagacgtggcactgggcagcagctcagacacaatgaccctgggtgacaataaaggccagtcagatcagcatggccctggtggcatcacagccctcagacaccaataagaccacaggctttggccacaggttcagtccattgccatcatgggtggaggggagagcgtggcaatgtgtgggcagacatgacactggagctgagagtgctatatctttcaggcaacaggaagtcaactgagacactgggtgatatcctgagcatagaaaacctcaaagcccaccccaacagtgacacactccttccaacaaggccataacaactccacccagcaaagcaacacttcctaatagtgcctctccctatgagattaagggggccaattacattcaaactaccacaaaagttttttttttttaattatttacatttcaaatgactgagcagctaaagacacttgctgttctaccagctacagaggatccaatgcctgtggcctctgggagcacctgtgcccacatgcacagacacaaacatactacaaagaacatgaaaaatggtaacaggatgaaatcaaacacatatacaactagcttcctttcttcttcttctttttttttttttttttgttttgtttttcgagacagggtttctctgtggctttggaggctgtcctggaactagctcttgtagaccaggctggtctcaaactcactgagatccgcctgcttctgcctcccgagtgctgggattaaaggcgtgtgccaccaccgcccggctctaccactagctttctaaaatttaaatatgtatggtaaattaaaagctttttagttttggttttgtattttggttttgtttaggccactaatatttggcaaaatttaaagaaactttctccttggcagttagtgctgagagtgtggagtgtatgctctgggcttggaacacacatttattattattttttttaaatctaaaaaaaaaatttaaagaaaatattctatcccctatcctatctttgtgagtctaaagttttatatgtaacttatcttttatcataaactaaggaaaaccataaccataactatctgtcttcaactccatcaaagaccccagaaggatataatataaactctataattgacagagacatcttgctgcctagacagtcacccaaagtttctctgtaactttggggcattcattttcagcccataagctgaagtttctggcagacgttttaatgaagtaggaaatttgaagatctcttttgtcttgtattggcaaagttgctctcttttgtgagccaggaaccctgaagaaccattttgtctcttggcaagttcagcagtcacttccctttgtaacctgcttgtccagtttggacagcgtgcttactgtcagcaggtgaggcaagggcaaactccataacgagtttcttctgcgtctatcttcctctatgatgtaactggtgttgcaggaacagttgtgtcttattgtcatgaaaaaccctaataagtcattttaagtcccgtattctgtaggtctttgaaaggttttcaagaatatgtatccatatgaaaatatatctctgtatatctagaaaacctaacaaacataagttttgactattataggcaggcggatctctgtgagttcgagactagcctggtctacaagagctagttccaggacaggctccaaagccaaagagaaaccctgtctagaaaaaaaaaaattgtgtcaataaaacaaaatccatacaaaagcaaagtactcatttctatatcatattcctttttttctttacaaagagattaactgcgatcattaactacttataaccaaccctgtttaaatgaaaacaaacatctataaacaatatttgagaatgtgggcatagttctctccaaactgcttcttgctgtttaaggtgctgtcaatcccaaggagatcctgagaaaacccagaaccatggccaaatcctggctgtggtagtctgaggctgcctggtctcagctattttggatgttggatcacctgggccactgcttcaggggatcttgcttgatcaaatcatattagtctggaaagaatccacagcttttcatcttctgtggaaacaaaagcagaacctcttttccaaagtaacacgtctttagacttaaattttgaagtcaaagcattttcaaaatatataggttggaatgtatacaacattctgcttccatgtatatctgcacaccagaagagggcaccagatctcattacgcatggctgtgagccaccatgtagttgctgggatttgaactcaggacctctggaagagcagtcagtgctcttaacttctgagccatctctccagccccaacccaaagtcttttagcagctgttattcctttctctgcaatcaaacaattcaaagacaacataataacatatagtatccaaaatctgtgtatttttcatctttatatggctttttttattacttttaaaatttttttattttatttatttatttatttattttgagacggggtttttctgtgtaattttggctatctttgaactcactgtgtagaccaggctggccttaaaatcatagagattcacctgcctctgcctctgaagtgctgggattaaaggtataccacacccagctactctattccttttttaaggactttctctatcctttttcttttctatcctaagcctacctatattttttataacaaatatttatttaaaagaaaagataacaggcaagatttgactcaaggcatatagtttgttgactactgaaactgaaaattaaattctaaatttagaaattattaattagaaatcactgtaaactgtttatcactagaacaaaattagtgcccaggaatattcttagtagaaaatgtgcaagacagatatgccacaagttatattactgtatccaatagtgacatgggacacataataattgaattaaaacctgaggacttagatgggaagtttacatttaatgattccagttctcttcagtgcatctaagttgaagaaattcaaactgtattttaatagtaaataatctaatgtttaacagataaaaaataaacacaggagagcaaatagtctctactattctcccaaatggagagagactgaacctagaggcagagtgtaaggttgtttgctttgtttcatttatttttctgttttttggctctaaataactgaaattctgcctgaagtataaggaaactcaaactcatactttataagtataaatttggagacaagttgaagtcatttttgatttaattcagacttttcaacccaattctcagttttcttacttaaggatggagttttcaattggaatgatttatcattgcagagaacttctggcaaggcttggggatgttgctgattgttagagctgggtattgagagagggcatggtgtgcagcatagcttctggctctgtggagtgaacagaggccagggataatatataaacatactataacacatgagacaatcctcagtagcaaagagctctctgcctccaagtgcgatgcgaaccctgtcctatgatcacttttgagtagtatttattcagaagtagtgtccttcagaggtaaaaggaactttctttcctacctatatttttaaatgcactgtaaaccctttagaagtttttcttcatctgaatcagtctttattgtatatctctgtctttttctgacagtgagtctttattctgctaaactgcgtggctaggattaaagctgcagctttggtagctggctctgctccattctttggcttcctgggaatctatcttcatcgcagaggtctggcgggagtcatttttattgccacaactttgcagagtttctccgtccatgccaccaccaagaagcatgtcaccggctgcttgtaaacaccatttaggtgtttggtagcaaggcctcattagccctgcagtttttgcggctaatgctgagtcaggaagtctctcttgaagcagctaagcctctgcttatctctagcaaacagagcccaccagagaaaatgctgctaccgagaagccgtgtttgactctgttcttttgtttttagaattcctttttaagctttgtcaggttttacgtgggaattattgccaaatgtttgggtgccacataattccagcactcgggaggcggaggcaggaagatgggatctctgtgacttcaaggccagcctggtctaaagagcaagttccaggacaggttccaaagccacagagaacaaagctacagagaaaccccatctcaaaaaacaaaacaaaaccccaaacaaaaaaagatttttccactggaactggatttacagatggttatgaactgccatgtgggtgctgggactgaacctgggtcctctacaagaacagccaagtgctcttaactgctgagttatctcttcagccgctattctaacatacatatatttcaacacacacacacacacacacacaaaaaaaaaacaaaaaaacaaaaaaacaaaaccacacacagagtttttgtttgtttttcaagacacggtctctctgtgtaacagccctatctgtcctggaactagctttgtataccaggatggtcttgaacttacaatgatttccctgcttttgcctcccaagcactggaattaaaggtgtgtaagtaacaccactgccacttggcccctattctatcatattatattccctcatttttttagggctaataaacatctactcccgagttcagacacacagagagatgatctaccctagttgcactggcattctttgggttttctatttcaggctgtttctgctccttcttacctagctaagccatcactccctctctagggtgttttgcttaaatatgaccttgtggtgatttgaataggaatggcccccatagactcatgtgtttgaataattggccacagggagtagcactattaggaggcatggccttgttggagtacgtatgtctctaggggtgcactttaagatctcagaaactcaagccaaacccaatgcagacttcactttgttttcagctgatagggatgtagagctctcagctccttcactagcaccatgtctgtctacccaccaccatgctttctgccataagaatggactaaacatctgaacagtaatccagccccagttaaatgtttccttttgtaagacttgcggtcatgtttcttcacagcaatagaatccccaaagaacttccccagaacacctattgccacaattctccctactagttcctcaaaatagtttattatttatttatttaggtttttcaagacagggtttctctgtgtaacagctctagctctcctggaacttgctctgtagaccacgaggttggcctcaaactcacagagatcctcctgcctctactgcttcctaagtgctgggattaaaggtgggtgacactaatgcctgccaaaatactcattttttaataacactgccacatctattacagtctttattcatttctgattttctatccctcttttagtatgaaagctcacagagggcagtgtgttttctggtcctattaaccagtgtgtccctacacccagaataaaatgtgtgtcctggcaatcctttaaaatgttggatgaaaagatatgcaagtgggttgagtcatctgtgggaggcaggtgggagttctcaagtgcagatcttgttcctcagcctctcaagaactcacagaataagaagggaaatgggaatttatttctccaatcttcaaattaacaaattttaaggaaataaaatgattagagtaatggggggaatcatatggatatttctacttccattaaatcaaaagaaaggaaggaagatgagctggtcggtggtggcacacacttttagtcccagcacctgggaggcagaggcaggcagaaatctgtgagttcgaggccagactgttcacagagttctaggacaccagggctatacagagaaactctgtgtcaaaaaacaaacaagaaaataaaaaggaaggagatgagaacacaaaggaaataagcctttaataaaacttgctgttttggctgcagttgatatatccagagacatcttttgaagccacaaaaaaaggttaaaataaggtttgttgatgctagttgctgatggtgccagtccagctgagcagcgattggtgatccaaatgttcacatggagaaacagtctttgaacctagagccgtcttccagttcttccacctccccaagggtcggtaagcctagtggcagagaggcagcagtgcctctaggcgcttagcaaagaatgtccacacactaaatagagaagagcccctgaggaggaacagggaacgtctccctacaaaggctgaggctaagaaggatgcttccttgaatttctcaattaacagcgttctttggtgaaatcaactgggctatgccagctctggttgaccatggaccacccagcaggtaacaaggttcctggctgtacatgggtcagtgaggcaggaagggccaggtcagcacaaagtcacaggccggctcttctaatgttgggtccacttgatgctcttgaggtcgatgccatcctgcaccatctcccagaggggactgccaaagagaagaggcactgataagaaacagcagccaacactggtgctcaggccctgagccatgatttgcctcctgtccttgctgctcctctgcctttgacctggtgaaccccaatacaggagatgcacaagccttttccagcctcagacctgagcactctcttatacaggagatgctactgagaagacggaccatatccttaaaccagacttacttccagggtgatggcaacaatgaccattttgtttgtgtgcttgtgccactgaagagtaaaccctcttctgcactacagccctatacccaactattgaattctgtgccttctgttccccggttaattttcttcaacattactgaatcccagactttgtttttgtttctgagaaaaggtctcattcacaatcttcctgccgaagcctgagggctgtgacttcagacatatgcaagattcctggttttggttttgttccttcttggcaagcactctgccactgagcttcccaccccagccttagcttgctttttagggttcagtggactttattgattcaacaataaatggttaaggaaaacgcgttacttatcactctcgaggcgtcatctgcagatgtgagaaccacccttcgaaagccttaccttgctttttataggactaggatcaaacccaggacctttattgatgttagacaagcaatctctatgctatatacaaaaacccaacttttgggggctggagaggtggctcagaggttaagagctctggctgttcttccagaggtcctgagttcaattcccagctaccacattgtggctcacagccatctgtaatgagatctggtgccctcttttggtgtgcagatatacatggaagcagaatgttgcatacataataaataaataaaatcttaaaagaaaacattttttaaaaaatgaacaacaacaacaacaacaaaaaacccctaacttttaaagcattctaggctgggtggtagtgttgtacacccttaatcccagcacttacaaggcagagggagtcggatctctatgagtttgagactagcctggtctacagagttccaggacagccagggttacataaagaaactctatctcaaaaaaaaaacaaaaaacaaaaaaaaaaaaaaaaaaaaacaaaacaaagaatctgaacaataggaagccaaagaggtccaatttcttcctttgtggagcctttagaaacctgcaaacacaggtttctgtgaatacagagcccaaggacaggaaaggaggcagctgtgcagcttcttccacagcgtccccggcagcagtgtatacctcatttcccggaggcgcttcacgtgatggatgcatttctccacagtgtagtccacttcctcttctgtagtgaagcggccgatgccaaacctgagagaacacacaagagctctacactaggcccagggttggcttggttttcttttttaggcagtgctcactgagaacctactaaacaaaagacaagaaagatgggggtggggtggggagggttgctcactcctttaatcccagcacttgggaggcagaggcaggnnnnnnnnnnnnnnagagagagagagagagagagagagagagagagagagagagagagagagagatctgggggtacaggggactcggttcaggggtagagtgcctgcctgaaatccagggttcattcctgactgcataagaaggcatggtgccgcacacctgtgagtccagcatttaggaggtagaggcagagcaatcccgggctacatgtgagttggaagccaactgggatacatgaaagctattagctcaaaggaagaggaaaagagcgcaggctgtctttcttagtaaagcttcttagaacatagctgtggacccgaatccactgagaagtctcctacagctactctgaatatgacactcagacatcttcatcttcaccaagactcaaggaggagaccgggacatagctcagtaggaggtgtgcttgcctatttcaaaaaatgcataaaccaggcatggtggtcatacacttataatctcagtactctggagctggagataggaggacagacttcaaggccagcctgggtacttgacaagaccttatcttaacaaacaaggaacacacacacaccaggtgaactcaactgacctgatagaagagtgtgctaaatcctcatcagtgccaattgctctgaggacgtaagagggctccagtgatgctgaagtgcaggcactaaggatggagacatgaacctttagcccataggacacacccagagccattactcccagggccctggaatcataccatagggaccaaagatacatagcctggaaatgtcatggggcctggtgatgccctgtacatcctgggacgtaaacccagtccctctggtccctagagtagataatgttcttgaggaaggacactgtcaaggtgtgaaccagcagttagatccatgcactttatctgaccaaagagccagagaaccttctgtatctggggcagcaggcacaatgtatgaccctgaaggacagataaaccctaggcggcttacaaccaaactaattgtttaactctgtaaaagacacatacatcttcatccaggcataatggtgcacaagcctttaatcccagcactcaggaggcagaggcaggaggatctatgtgaggttgaggacagcctggtctatacagagagtcttaggatagccagggctacatagtccaattctgtctccaaataaaagacaaaagaagatagatatatcttctaggtcctaaagtcaccaatttctgtcaaagacagagacctgctagctatgtgaccatcagcctatggccgccagctaaaaagtgaccttaccagcatcaagagcttctccctaatccagccaggaagctcagtgacctgtaggttactgaacaggaaagctaactggtgctatcacagtgcttgtctacctggtccaactcaccttcctgaggacaaggcaacatccttgagtgccatcagcagactctccccctccacatatgcaaaggagaggttgatacaccctgaagaagagaaaacatgatgacagccctctgggtctcagactctgccagaatggagccgagagctggagacagagctaaggggtagacaatttgcctagcgtgaaagaggcaagtacagacaaacaaacaaacaaactttagctaaaaaaatatttaaaaaacaaaaacagaatggtggggctgcagagggggcaccaggatggctcagcacgtaaagcaagcacttgctacacaagcctgatgacctaagttgtatctctctggaacccacaaaagattggacgcagaaaactgactccacaaaattgtcctctgacctccacaagtgcactgtggcaggcatccccatgcccacataataaatacaatttaaaaaagaacagaattcagattggaagggcgcgtccataccagggtagtgctgtttggggtccccgttcatcaccacatctggaaggctgttcattatcttctgtatcagccgctctgctaacttggagatccgcttatggtcatactaaggagcaggaagggagagctcagtgcagtaaccaccagacagctcagcgacagagagttccagaagccctctctacccaggagtgggtgtgtgccacacaggcccttctattgtcttgctatgtgtggagatcacaggggctccagcactgtctggtgtgtaagaggtgctcagtagctgaacacacggttctaacaacccggggaaaatgaactgggaaccacgaacaggacacgttttgaatcatctcctccagaacaagggggcggcaggaccttgacagagcaggtttttatttagctgtgggcacatgtgcacacatttacttctgagggattgaaatcaaggccttgcatgtcccaggcaagtactttcctactgacccagccctttactttttattttgagccagggtcttgctatgtagtccaggctagccttgaactgaaaattcttctgtctcgggcccccaggcagctaggataccagcattgactgccacacctggctcaaagacaggatttccttccagcagagatgagagtctgctgagctgttactaaatgggagaccttgaaccgctagtgggacggacgttctgaggggagctgcggctctctccagtacccacctccatctcttgctgtgccacctcacaagctgctcccagccccaccaccaagggtgtgggcaccgtcccagaccgcataccccgctcctgcccgcctccgctctgtagggcctccacacggacccggggcctacgccggatatagatagcaccaaccccttggggaaaaaagttgttagaaaaaaaaaataagagagagagagaaacaccaatgaaacaaactggggaaccaacagaggaccaaaccgggccgcctgaacgtgagtgtcagctaggagcactgggcagtctatgaggcctctggcagtggcaccaggatgtatccctagtgcacgaacggacttcaggggtccatttcccatggtgggacactctctttgcctagatacacgggagagggcccaggccctgccccaaatgacttgacagattttgatgacccccgcttcatggaaggccttaccctcccttgggagtagatggggggatggnnnnnnnnnnnnnnnnnnnnnnnnnnnnnnnnnnnnntggggggggggggggggcatgggaggatgggtgggagagggaactgggattgatatgtaaaataagagtgtttctaatttacataaaatttatttaaaaaagaaattaaaatatttcaaattttatagttaaccttttctaaataaaaaaaaaattaaaggaaaagaagaaatgtaaaagcataatttttagcaaaagtattcaatgtaaattatgttaccacaggaataattaccaaaattatttcaagcagctccctatcatacaacgtagacttctttttaagattaattttaaaaaattttatgagctgggtggtggtggtgcatgcctttaatcccagcatttgggaagcagaggcaggtggatctctgtgattacaaggccagcctgtaacatgaatagtgaataataaaaacccagagacagatattggatttcaagctgaaagatcagagaagcaaagcagccagccactagagagttcttacctctaccactccaccaaggctggagcgatcctgtcctcagagtgactgcagactgcaatactctctaccaaaacaaccccagactgcctagactgcagactgaatacagaatgagaccctgagctcctaccttatattcctctctagtgctgggattaaatgtgagggctctgtttctcttttagacttagtcactctcatgtagcccaggatgtcaagttccagaggacctgacacccacggcaaagcaccaatgcatataaaataaaaattaatacattaaaaaaataaagttgaaggagaagaagatgatgatgataacaatgacaacccactaggggctagagatggatcaatggtgttgctcttccagaggagacccaggttcagtctctaacacccacataacagctcacacagttataactccagttccaggagagtcagtgccatctgctggtctttatggacattgtgctcacacaacacacacatgaattcaagcaaaacactcacacatataaaaataaatctttaaaaaatcaaataacttaggtgataatcattggaggaatttaaataagtcatgatatgttaatataatgaaacaccaagcagatagaaaagcctgactttgtttgtttttcgagacagggtttctctgtagctttggaacctgtcctggaactcactctgtaggctggcctcaactcaagattgacattcttgggctggagagatggctcagaggttaagagcaccgactgctcttccagaggtcctgagttcaattcccagcaaccacatggtggctcacaaccatccgttatgagatctggtgccctcttctggtgtgcagatatacatggaagcagaatgttgtgtacataataaataaataaaatcttaaaaaaaaaaaaaaagattgacattcttgggctggagagatggctcagcggttaagagaattgactgttcttccagaggtcctgagttcaattcccaccaatcacatggtggctcacaaccaacttgaatgagatctggtgctttctgctagcacacaggcagaagattgtatactaaacaaataaaattcttctaaaaactctaaaatacattgttagtaaactggtgaggtcaggcttgtggcacatgcccataatactagcactagggaggcagcatcaaccttagataaagtaaaacccctgatgaaaaagaaaggaaagaaaggaagatctcaacaactctgtactacccctttccttttatttcagcttcctttctagactctcaagtactctaaggtgacctaaaactcaatatgtaatcaaaaataaactttttcactggatggtggtggctcacacttttagtttcagcactcaggagccagagttcaaggtagttctaggatggctaggggcactcagagaaaccccgtctcaaaaaaaaaaaaaaaaaaagggtctaataatatagaactgcctaccctggaactcactatgttcactatggagcccagactggccttgaactcacagagatctaattgtatacaggactttggaattaaaggaatatactaccatgtctgacattttattttacttttaagatggtttgtaggtgaaaaagcaaatgagaacacacataatttaggtaaaaaggggtggaaggaaagtatggctgtcctcataaataaaaggaactgtaaaaagggcgacacagcagacatgtctatgaccccatcactcaggagactgaggaaggaggatgcaaactcaaaggcaggtgggactaaatcacaagaccctgatgaggagtgaatagggtcaagaagagatcctactcaagtcacattttagagtacaagttggcatctgcaagaacagctcatagaactgttaattataacctgtgggaacctttggtagccagcatggtggggcagttagtattatcagcctatctcatgaaatctgttctgtttttacttactgatacctagtgaaacctgaattaacagaaccctgttttcctaagccaaattaacatccgtatcccctttaaggacatgtggagggatcaaagaagaatgcctgctgtgtacacggcacatatgaagaggcaagagttttggctactgttgaacgaaacttgcatattccaggccactctgaaggtacaaccttcctgaaagcaatgtgatgagcatctgtcaaagggtttgctgagaagttcgaagaagaggcaggggctggtacctttaggaccatagagtttgtgaccgctgatgctcatcagatcaattttcatatcattgacatcaagtgggattttcccaacagcttgggctgcatcagtatggaaatagacctttctggaactgcaaatctgccctgagggatgacagagaagaagacccatagcacagtaaaagtaagctgccagcagccctgcaaggcaccacggatgacataagcaactgatatataagtcctcccctactctgggccttcccaccttcatgtcccctcccccacccactccctcccaactcccagcctctcagctattcctctaaagatcaagggcaaaacacaaaaccacaaacacacatgatgttttgatgcccaagattctgtataccagctcatttaccttggggctatagtatcaccttttaaattcttttttatttaaaagaagcaaagattaattggtatttttgctaatttgcatacaggttacaaggtgaactctaaatggggataaagaacattctaaatggaaaaagaatagatgcccttatcttactgtgttgtcatttggggcaaaaaaaaaaaaaaaaaatgaaagaaaaaaaaagggcattccaccctccattctaaaaactcaaatagtagccacaccacctagaatgtggtcagcaaggcacatagttcttttccttggacctcttggctactgtgttaaaactgtcagtacctgatcccttatatggaccccagggctggtaagggtcagggataacctaatatactcacctatttctgcaataggctgctttacaccaatctcattgttcacagtcataactgatactaggctggtgtctggctggatggcagcctctagttcctaagaatgtaggagtaaggagtacatgtgatgccaagagaactatataaataagaatgtagacaacctttagcctagaaaagtgacctttcactataactccatctgaacacttttttttttttttttttttttggtttttcaagacagggtttctctgtggctttggaggctgtcctggaactagctcttgtagaccaggctggtctcaaactcagagatccacctgcctctgcctcccaagtgctgggattaaaggcgtgcgccaccaatgtccggctatgaacacttaaatcttaataacagggggtttgggatgtagctcagtggttacctagcatgtttaatccctagtaacaccagataaaaatacacagtaacacacaaggcactggagacatggctcagcaattaagagcaccacctgctgtaccagaggacccatgctcaattcctagcacaccatagaggaacagaactgactctaactccagttccaggggattggacacattcttctggcctctacaggcaccaggcacacatgtggtacacagacatgcatgcagagcaaacacccatacacaaaaaatagaagttaatcaggcgttggtagtgcatacatttaatcccatcactctggaggcagaggcaggtggatctctgtgagtttgaggccagctggtctacagagcaagttccaggacaggctccaacacaatacagagaaaccctgtctcgaaaaacaaaacaaaacaaaacaaaaacaaaaacaaaaagaagaagttaaaaaaggatgggctgaagaaatggccagggggtttaatagcacgtgttgctgttgtagatgacataagttcaattcttagcacccacacagtggctcactaccgtctgtaacacccaggcactcataaaacaaatctaaaaaaagaaaagagaatggctagttgagtaggtattgtaccctatgactataataccaactctcaataggatgaggcaagaggatcaggagttcaaagtcattcatggctacagagccacttgagctagcctgagattcacaagacactgtctcaaagacaaaaaaaaaagaaaaaagaaagaaagaaaagaagaaaaagacttaaagcttacacaagagcctaactagaccaattaaacaaatcctgatttcaagctgccacagagatacagaaataagagcagtatggtcatggcatgaggacagacgtgaactaggacagaaatatatattcaagtcttttatttgtagacaggatctcactctgcagtccaggctagctccacactctggtgatcctcttgtctgagcctccagagggctgagtttaagggtctggtctatacttgcgtgtttgtttttacagttctggggttcaagtctacagccttgtgcatgctatgcaggaattctactgctgagacacacctccaaccacccggctccctttatagctcgtaagaaacattagtgcagggaaggatgaggcagagctcttctgtggcgtggatatctgacatcctacactcatgtccagcagctctcctacaaaccaggatcaccaaaaaagctaagaggcaagtcttccacagagaagatcagtgcacacatagagagcatcatctccctctctgctcaatgctccactctcaccattagctcaacctttaggctacacccacggctggagagacaggatgaagccaggccccgcccatttttgtcagtccagcctagcataggactcctacctttaagtcaatgatcccactcttctgcactgggaggtaagtgactcgaaagccctcagcctccagtgagcggcaggaatccagcacacatttgtgttcagtctgagtggtgaccacgtgctttttccgtgacttgtagaacctggccactccctaaaaattgatgataataggaaaaaagtataacagaggtagcaatgacatgaatcctatttataaacagttttcctaaggactgaatccagagcctcgagcatgctaaagatattctatgtcactgaccaagttcccattcttgtatgtgatactgtcaacatcagaagaaattataaaaataggctaggaaaaactgaaataactagaatctcactatgtagctgtgaaattcacagagatgtgcctgcctctgtgttccaagtgctgggattaaggctctgcaccatcacacccagttttgctgaactatttataatagctaagaaatggaactcaacagaaaatgcccataaagagaatgtggtacatatacaatagcatttaatttagatgtaataaaaaattaaatagtgacatctacagaaaaatgaatgaaatcacaaatcatatgttaagcaatataagtcagacagaaacaaattctgagctgccaacaggttcagcaggtaagggcagttgccacaaggcttactacctagagccccaattgtggaacctcaacatgtgtgttgtggcacaggcatgcacaaacataaattgattaaatgatctaaaaaagacatgtatcaccgggcgttggtggtgcacacctttaatcccagcactcgggaggcagaagcagacggatctctgtgagttcgaggccagcctggtctacagaacgaattccaggacaacctacaaagcaatacagagaagaaaccctgtctcaaaaaaaaaaacaaaaaaacaaaaaaacaaaacaaaacaaaacaaacaacccccccaaaaaaaccgaaaacaaaaaaagacaagtattatatcctctcttaagtggaatatagatgtgttatagatgtgtgcatatgtgtaaatatagccatatgtgtgtgtttctaagtcataaaggtagaaaagggaccatgagaaaggaaagagatctttgtatgtatgtatctgtctgtatgcatgatgtgtgtctgtccatggacatgaaggcaagaaaggatgtttggaggtcagaggacagacaacctctagtatcagtcctcaccttctaccttatttgaggcaaggcctccttgctgtttgctgctgacctgcaagcctgtgcagggtctcttgtctcttctgcctagcagttacagacacacacactgttatgcctgacttcacctgtgctccgaggatttgaactcaggtcctcacacttgcacagctggaaaggtagtcatgatggagagggtacagacacagtggcgtgaaagggggaggggacctactgagggaggacaagggccagcaaggatggggcagggtaaaaacgaaatgtgtgcatgaaaagccataataaaatccattactttgtattctgattttaaaaattaatttaaaaaatttaaatcttggggctggggagattgctgtccttgcaaaggacccttgttcagtttccaacaccttcatggcagctcacaaccatctttaactccagttccaggagatccaacactttcccttggcttccataggtaccaagcacacatgctatgcatgcacactcgtatacatgaaaaataaaaataggggccagaagcctttaatgccagcactcaagaggcagaggaggtggatctcttgagttcaaagccagcctggtctacagagtgagatactacagaggctacacaaagaaatccaatctcaaaaaaaaaaaaaaaaaaaaaaaaggcagaggcatgaggatctctgtgagtttgaggccagcctggtctccagagtgagtgccaggataggctccaaagctacacagagataccctgtctccaaaaacaaaaaacacaacaacaacaacaacaacaacaaaacccaaaaaagcaaaacaacaacataaaaaactaaaccaaacaaaaaaacaaacaaacaaaaagggggttgggagttaggttggagagatacttaaaagttaagagaattggctcctcttccagagaacccaggttcagttccaaacacccacatggcagctctgtaactcctgtcccaagggatctaacaccctcttttgacctccacaggcactacatacatgtggtacacagacatacatgcaggcataaacacccatagacataaaacaaaaatatatttaaaaaggacaaatagggggttagaatggaggcctggtggctaaaagcacttgttggtcttgcagagagttcccagaatccacatggcagctcacagctatctgaaactcaaatcccagagggccagacacacttctgaccagctttagacagcaagcatgcatgtaagaaaaatctgagccggacgttggtggcgcacgcctttaatcccagcactcaagaagcagaggcaggcggatctctgtgagttcaagaccagcctggtctactgagtttcaggacagcctccaaaagctacagtgaaaccctgtcttgaaccccccctcccaaaaaaaaggaaaaataaaaatgctgaaacacataaaactaacaaaaattttaatttccttttatattttttaaataatttatttatttgtattttatatacaatggtgttttgcccacatattggagttgtcagattcactggaactagagttacagacagctgtgagctgccatgtgggtgctgggaactgaacccaggttctctggaagaacagccagtgcacttaaccactgagccatctctccagctcaattttcctttattttattttttggttttctttctttctttttttcttttccccacaagacagggtttctctgtggctttggaggctgtcctggaactagctcttgtagacaggctggtctcaaacccacagatatccccctgcctctgcctcccaagtgctgggactaaaggcatgtgccaccaccacttggcagttttcttttgtctttgagacatagtttctctgtgtagtcctggctgtcctggaacagtcctggctgtcctggaacatacactatagaccaagctggactcaaactcagagatccacctgcctctgcctcctgagtgctggcattaaaggcgtgtgccactaccaacaggctccactttttttttttttctggtttttcgagatagggtttctctgtgtagctttggagtctgtcctcgaactcacagagatctgcctgcctctctccagagtgctggggttaaagacttgcactaccaccaccaggcttaatttttttttttaaatgtgcgttggtattctgccttgggtgtcagatcccctgaaactggagttacagacagttgttagttgccatatgggtgctgggaattaaacttggatcctctgaaagagcagtctctccagtcccaactcccaattttaagtagataaatccttaaaaagagataagttaatcttatcaggtgcacaaatgatttttcaaaaaccaaaaacttttaaatgacaaaatgagggctggagagatggatcagtggtaaaaggagtatacagctcttgtagaagaatcatgaccggtccacagtataaacactgaatggctcacaattatctataattcactccagagggatttaatgcctctggcttctgagaacactgcagtcacatgaacatacccccacacagatacacacaaaactaaaataaagtttttttcatcttaaaaaagcctggtgcagtggggtatgtctttaatcctagcattcagaaggaagaagcaggcagatcactaggagtctgaggccagcctggccaaaagagtaagttctgggccagccagagctacacagtgagaccaggtctcaaaagagaaaaaaaaggcaggatatcagaatattaacttatcagtggtacagcacgactttagtaagcttgaaagttgaaatgcccatcaccaaaaaataaataagaaaaaaatagacaaatagttgactagatctaagtaaaatgtgattgtgttgtatgaattatcagcatgactattaagagtgggacacttgcacaaagtatctgcttggcccaaatatagaaagactgatacagacctagaccgagtcaatggcacagggggtaccaaagcaacaattactgaaaaggcagaggaactctgtaaacagatccaatcagaaagcaaagggagagcccataggaaagtaagagtgaactgatccctgatggggaatgtactgtgtatgtttatcttattgattgttaaataaaatactgtttagccaatgagacaccaagttagacgggactaggagtcaaagaggattctgggaaatgtagtagagaagtggtgatccagcaggcagtgacatagcaaggagactcatatttaaagaaggagaaacaggaagggtccctcttttccccttgcccctccagcagcacaaggtgatccaccggcaaggagggatgccaatacggcgtccgataagataagtcttataaaatatatagatttatgatagttaagactgagctaacagatgaggaatcctagtcattggccaagcagcatttgaacctaatacaagtttctgtgtattcatttgggcctaactcgggcgggcggctggtgtaaagctcacacgtggcagtggggctcaggcggcttttggtagaaagatttatagtaacagatcccagttagttttttgtcaacacgaaacaagctaagatcatctgagaatggctacctagctggaaaaaaatgcctccatcagactactgcctgtagtcaaccagtaaaggtactgacctgattaataattttttttttctttttttttagtttttcgaggcagggtttctctgtgtagttttggagcctatcctggcactcgctctggagaccaggctggccttgaactcacagagatctgcctgtctctgcctcccgagtgccgggactaaagacgtgcgccaccaacacctggccctgattaaagattaatgtgcaggagctaatgcaatatgggtggcactacccctgggcaggtggttctgggtggtataaggaaacatgctgagcaagccactgggaggaagcagcccttctccatggaatctacttcggttccttccctaagctctttccctcacttcccttcatcaagagccagtgctcttaacctctgagccatctctccagccaccacatattttttcttttaaggcataagaaagaaatagggaggtgtgggaatctgaggaaaaaaatatctgagtccaaatgataaaggagctctaatctctaaacccaaaaagcccagagatagttctggctcccttctgtttccttctgtccctcatcttcccacatgctcctcactctcctaaagaagtggtccaccacacagtgtcctcaccccattctcttaccttaattgctatgttgttggattcagtagctccactggtgaaaatgatttctcgaggatcagctccaatcagagatgctacttgctgtaagccaagagccaaagatacatagcatcagttccctggcaggagtagggctgcagacatagctaggccagagtttcatggcaagagaaactccactgcattctacccactgcctaccaagacactctgtgcatactaggtctggcttgagataaaaaaaggaactgattattaaagtttaaatgttctattctttctccattctaggacagtctaataagaatgtcaaatgtggccgggcggtggtggtgcacgcctttaatcccagcactctggaggcagaggcaggccgatctctgtgagtttgaggccagcctggtctacaaaagccagttccaggacagcctccaaagccacagggaaaccctatcttgaaaaaaaaaaaaaatgtcaaatggagctatggctcagaggttaagagcactggctactcttccagaggtcctgagttcaactcccaggaaacaaatgatggctcacaaccatctgttacgagatctggtgccctctttgggtctgcaaggacacatgcagacagaacactgtatacataataaataaatctttttaaaaaagtaaaaatgtcattcagttgatagagtgcttgcctcatatttatgaagccctgcatttgattcccagcactgcataaaccaggtatggtggtgcaaacctcaggaagccaaggtaagacagctgccatgagttcgaggccagcctgggatacagtaagttccaagttatcttaggctagaatgtgaaactggtctcaaacaactaacgtgcggagccagtgagatggagcagtggcatagacactactaacaggccaggtttcacttcctgagatccacctggtaaggtgaaagtctgctccaagttgtcctctgatctccatactgcatagtttggtacatacatatatacatacatgcactcaaaccaaccacacacatacacagatgttcacgcacacatatttgcaatttaaaaaattattctttgctgggcagtggtggcacacgcctttaatcccagcaggcaggaagcagagacaggtgaatctctgagttcgaggccagcctggtctacagagtaagttctagggcagccagggctgttacacaaagaaacactgtcataaaaaaacaaaatcaacaaaaaaattctaacaaaatgtcaagcaagaaactggaaaaatggctcagtgttaggagcactggctcttcttgctgaggacccagttttagttcctagcacccgcatggtggttgacaaccatcctaaacttccaggcacatacatggtacacacacacacacacacacacacacacacacacacacacacacacgcactcaggcaaacactcatacacacaaaagtaaaaaaattttaaaaaacatgggtatctacatctcatcaatacatctatgcacaaatgcaaaaataaatattcttaatgataaattttgtttttaaataattttttaacatttatttttggttgggtaacattcattccacagcatgtggatttttgggggattaaacttaagttgtcaggttagaaatgcatttttaaaatatatttaccgaactctttctatgcacttcttgagcaatgtgtaagtgttagcctttaccaaaccagcactgtgtcatttaacttacccaatccccttatagagcatgaactatttcactttcaacttgataggtgaggattttaaggcttagagaaatgagatgattttcccaaggtactttacctagtgaatatgtgaagtaattaaacacctgcagtccaactccaaaactactctctgaatctcttctagaaataccaccatttcctaagaaagaaatgcctcccgcaggccaccaaacttgacttgcaacttcacagagttctttgtgctaacctggcgagcatgttccatggctgcttcactctcccagccatatgcatgagtccgagaatgagggttcccatagtagttcacaaggtatgggagcatggcatccagaaccctgggatcctgtacacaagagaacagatcagtctctctgagtctataatcaactcagaacctgctgcagccactgcaactgcccaccttgctcagtgcccacctcttcacatactaatcaaagattgacctgatataccatactcccacttcgaaaacatttttttggggggagaggggttgaaacagggcttctctgtggctttggaggttgtcctggaacttgctcttgcagaccaggctggcctcaaactcagagttccgcctgctcccaagtgctggtattagtttatgctagggctggagagatggctcagcagttaagaacactgactgttcttccagaggtcctgggttcaattcccagcaaacacatggtggctcacaaccatctataatgagatctggtgccctcttctgacctgcagacatactacgggcaggcagatcattgtaataaacagacaaatctttaaaagaaaaaaggaagtttatgctaccatactggcaagtcacagctctttgtaaggcatttcttggcaagaggactgcatttctgctctcccctaggaaaaacaatgggaacacctgtagaaacagttggaacaggcctgtgtgggatgggaatctagatggtagggcactggcccagcatgtacaaagcctttagttggattaccagcacttcacaaagccaggcatggtggtatacagttctgatcccacacaactctaaagtattggggaggtggagtcagaaagattgggatcagaagtttaagatcttcaactatagagtaaatttgagggtatctgaggttagaggccttgtcttaaaaaaaaatgtaaaaggggttaggatggagagatggttcagtagttaaagacactggttgctcttccataggacccggatttgattcccagaacccatatcaggcaaattaaattgccctgtaactacagttccagggaatctgacaccctcttatggactccatggactcttggtgacatgtagggcacatatacacatgaaagcagaacgcccacacacacgtaattaataaaataactttttaaaaaaggacaagattgtattgctagaagaatgattaaaatgtcaggctgttttgttttggtggggccggtggattttagagacaggggctctttgtataactggctggcctggaaagcacttgcactgtagtcaaggctggccttcagagatctgtctgcctctccctcctgagcaatgggattaaaaacatgtaccaccacacccaggaggactacaagtttgaggtcagactgaactacataagactctatctttcaataaacaagtaaaagaaaatttaaaccaggttggccttcaagagactctctcttaaaacataaagtagcctggcagtggtccatccctttaatcccagcactcaggaggcagagacaggtggaactctgtctgacctagtctacagagcaagttcccagcaattcagagaaaccctgtctcgaaaaaccaaaaagaacagtcttaggttctagagagatagctgagtggttaagagtaaaggttgctctttcagaggaccgaggttcaatttctagcaaccacatggcagtttacaagggcctatagagttcccgtttgaggggttccactctctcatggcctctacaggcacaacacgtatgtgctgcgtgcagacaaacatttaggtaaacacttacttgtaaggtaaaaagaaataaacagggtcttatttattcctagttagtcaaagatgaccttaagattccgatattcctgcgtctacctctcaaaagctggaattacaggaattgagttttatgtggtgctggggattgaacccaagactctgcattccagccaagtactctaccaactgagccacatatccagctcttagtaactgtttttatttcatgcttaccatgtgctggactgctgtctttcatttcatttaacacttgaccaaatcctcacacatttactatatggtagttaattccggagctaattccagagcctatgtatttgtctgttttctttatttattttttatttttacacaggtttgaagctccctatgtggcccaggctggccttgagctcactcaaactctccatgctacaatgtccagctccaaggcctgagcatttacaattaactacaatacctgttcgaaagtgatttgaccaagatcaatagctaaaaactagtaaagccttttctagcaaactaaaatctaagcctcctgatgcctgactcgcttttctagcacatttaatggttctgaattctccagaaatctagccttctggtaaaatttgttctaaccctcaaagagcctgggggaaggttccctttagtccttaccagaggagttgtagcctgcacatccatatagagaggtcgcagcactgtctctgagggaacagccgagtggatagcatgatctacgactgacaacagagtggagtggcaaagtgagaaatgacgcaaccgtggatgccaggtgcacaagacaacagattgccaaagccgcttcgaggtaaattaaggaaggttgaggtcgagtgtcaaaggaaaagaaaacaacgggcggtaaaagatattgaggaaaataatagacgcggggttctttgaagggacgctggcggcaaaagggagcaatctttaaactatccagcagagtggatggctctaaaaagcaaaaacctttataagaacattgaaaagcacagggtccttcaaaggttcatgactggaggaacctcgaatagcatctttaacagttggtcaggagagatctgaaggatgagaccctggctcatatgtggcaagatgtacgggccgtcctgaggaaatgtgagagcgagcggcgggacacggaacgcgtcgggcaggctccgcaacaatgcagtgcgtagcagcaaccacccagcgggttcgggcggctagggagactgggcgctacaaagaaggggggcgtaccgcgcaggcgcaatccccgggtgggcgccgtgaacccgggccgggccgccgcggcggccgccagtgccgcccgcctccaagtggctcgcagcatgctcccagcagtcgagcccaccatccgcagcgcttgcaagttctcagcccatgctcccggaagtagctcccagcgctccggaagcgatacgacaggcgacgagcgccctccgcctagctttcggtgtgagacgtagagccgagcgaacgcggcggcgaacgaggtgaggtggggccgggcccagcccggcgtcgcgcgtgcggggtccctgactgccagcagggtggtggaggcgtgctccgggctggcgtccgccccggggcctgcggaagccttctgggcgccgctggctgccggcgcgccaggcctccaggcctcactgtcgtagccctctctcaccccagatgccggtggccgtgggtccctatgggcagtcccagcccagctgcttcgaccgtgtgaagatgggctttgtcatgggttgcgccgtgggcatggcggccggggcgctgttcggcaccttctcctgtctcaggtgagcctcgcgggcgggacttcctgggatccacggacacttagtcgaggttggaagcccagtgcttagggatctgagctctggagtcaaaatggctttgtgactcctttgtagtttagtaaccttaggcaagttagatgccgtttcctcagctgtggtcgaggacagtacgcttacctccacttttctaagaaccgatcatactagtatgctttccataaactctagcatgtcgtaaatgcgcagtgaaagcttattgttgcatggcattttaacttacaactgaatgtgataaaatgagcttgtagagccattttccgataaacttaattctgagatacacggttattctaaaggccatctccactatttattcagttcttgttaaatgtgctaatgtgtagtgaatcagtttgtaaagtttcactttacactttgagcagcttataaactggccaactttttaatctgggttaaactccaaaaataaacactaaggcatcatctataagacaaaaaggtctattaggtaacacacccatagaagcagtcatgactgcatttcctgccattacatgtccttctgttcctcttcctgctacaaacagaagagaattctgtacgtaatgccctagagcccttagatgttttacttgtcactgctaatcctccttggggaaagagtaacatcttaagaatgacaaagataaaggtattatcaagctgttaattcttgatatatttcaacaatgattataaagggtgaaggaaggtaattcaaaatctttcgtctatttttattcctaaatgatcgcatcttcctcctcaggatcggaatgcggggtcgggagctgatgggcggcattggtaaaaccatgatgcagagtggcggaacctttggtacattcatggccatcggaatgggcatacgatgctaatcagggcagtgattagctggctacatctttactttcccattcatttcaacccttgtacaataataaagttttttcttctcagtcttgtctatttttactccaaaaaaacatcccaaagggctaaagaagttggtcagtccctgtatccccatagttacattttctagctcctgttgcttagggtcttctggcctgtgcaggcatcagacacatacatggtacaccttatattacatccaaggatgcaatacttaaatctctagccaggcttaatgtgttgacatacacatttaatcctggtgcgatggaagtggaggcagccattgctagatagacctgtccaaaaacatttttttaaaaatatttgagctaataaaaatgagaagtcccaacagatgatggtacacgcctttaattccagcacttggcacaggcaggtggatctctgcattatggtctacagagccgagttccgggataggctccaaagttgagtacagagaaacactgatcagaaaaaagttttttttttttcacaaatcctgtttctgcatatcaaatatagtaaacatttgcttcttggcaaaagtagacaatttggacatggtcacatacactacatgtcacattcacaatagaacattgcatgtcctgagattgtcttcctaactttagacggaatgatttattgaaaaggccagtttctcaaggactgtatctttatcaggacattcctaacagcctcaaaattggacattagaatgtaatatccagaccaaagatttttctgatgtggattacccttcaactaaattttgatcagaatgctaatgcaatgtccttaggacatcaaagcccttttgaagccctagatgccaaagggccccagccggctgagtggcaaactcagccatcttgttttcattgttcacccaaggattgcaaaactattagaaaacacatgggcaagagttggaggatctgccaaccaaaggataatgttcaaaccaagagaaaggcctcagctccatctagggctcccgaagatgcccaggccccatagaaaaggtttctgtcaacatgaacacagatggactggtgtaacacacaatttgcagatcatcaggacgatattgctgctttttacaaataaactagaggtaagatctgtgtaaaagtgttttgagggcataaaaagaaactcaagatttagcatctacagatttcttatcaaagagttgcaactgcaattaaatggacttcactcagaatggactcttcaaaatactttctgtgcatcttatacaagaaacaagataacaagaggcagcttgtttgacccagggaacataccttcattgcaaacactatgctgtatgtattgacacatatatacaatttcaagattgcagaggttgagagagtagcattttcaaattgtgaaaaacctaaactgtaatgcttagacgctaatttgaaagcaaaagagaaaacaatcaccgacagcctatgctccagttagtaacctcaaaatttaaaaaaatgaaaattttcttgtggcctttttcagagaattttatttgagtggttcttacaaagattgttgcaatatgaaagtcatttgtttgatagaaatatcaagctgtcttgtcaaacacactgaagtaacccaaaaatatatttcagagctcacagagcttaaaaagagcaaagattatatgcaaccagacaaaacctatttctgcatttcctatatcttgcccagacttctttgctcaaactgttacatcaaccatcttcaggaaatgcagggatcattttgtttggaaactcaagacacactaaaacacagtatttacaaagaaacttttacacatacattaattgaaaagttaccatcaagaaatataattttgaaataccttcttgccaaatgatcaaggtgagatgctaaacagcctcttagctgcctagactattcatacactgtgtattccagaaacctttgctgaaccatgagccaaatacatgaatgaatgtgaactgtaactgctatgtaaaaagttaggcttctgaaacattaaaatattacctgtctgcctttatacagaaaggacatttgttcccctagagctattctatagatccttaatgtaattttctacatggacatttaaaacggcagaacaagcgaacagctttgcataaagtaggatttgctagttagggagaatgagcacactgcattcctgttaacatctttatttttcaagataacaggagttgtatacaaatgacagtagacccttgcctctttatttttatctaaataaaagataactcaagatgaattctcaagaaaaaaaaaaagctatatacataagggactatatcttccttcatcgtctacttggaaccagtagttgtgttgctgtcatagaatcaggaaagaggttgtggtaagttggaagaggtacatatgcagctgttatcattttacctgttgacaaaaagaaaaaaagttgagtgattactttcatgttatcactaggtgttcaacataaagtctttgtagcagtcactcaccagcaaaccacctgccatgcaatgcattgacagcagcaatagctgcagcaatagatgggcacttcacatatacgttgccctgaaagcatatcaagaaaaaatcgtaattagaaacaactgtattgaccacatattctcacaaagaaaaaaaagcaaaaacaaaaatgaaaatacctgagctgaatttttgtcaacataaatatgaataactcctccatgtttattacattcttcaataacatcatctttaatctctgtatcccatccaacttcttcttctctgtaagaaagcagaaagataatagaattgtattcaaataggaaaggtgcacacattatctgtgtatgtatggccatgtaggttgacccgtcagagggagaccattctccttgtcactatatgggtatcaagtgatccaaatctagtcctcacacagcaagcacctttgctcactgaaccacctaatgtgccttacaccatgcagtaagtctcttcaagaagcataactattcgatgggcaaaggtggtgcactcatttaaacccagcactcgggaggcagaggcaggcagatcttatgagttagaggccagcctggtctacccagccagttccaggacaggctccaaagctacagagaaactcttgtcacaaaaacaaacaacaaacaaaacaacaattcagctgggctaggaaacaaatgagctcactccatgaacctgcctatttatacccaactcaaaactgccattcatgcaaacatggcaactaacaatacattctgagccatctacctagaagctaagcatatattcttaacatttaaggtatcaaagggtatgaagcataaaaagatatacaaggtgttccatttgagcttattgttactaccattgtaaatttttgtggaactggctcagtagttgacagcactggcaaatgtgtggcacatatacaaacatgcagaaatactcatattcataaaataattttaaacaaagcaaaaagaattacaagtacacaaatacatggtatttgtggccacacagaaatttatcattaacagagtttaaatttcagctttgctatgtgcccaaataaaatataaactgcgtaaaaaagtgtcaactatttatcataatactttccaactatgaaatattaaaaatgggaaattgccaattgcaaacacacttacgtttgagggttaaacatgttagaaagttgaaaacattgtgttgcaagtggttgaacagacgcagctgcagctaaagctgaggctaaaaaagaagaggaaaaattagattcctggaatatgtgtgaacatccttggacaattacctaaaaagaaaaaccaccctatcttaatgtggaggagatattttccaatcaccatcaacagttgctcattatatcatgacagtaatagtaacacaacagttaagctgttaaattaagcttataagattaactaacttataataggtaacacaatgtataaatactcaagtattctttagagatgagatggggaaaacagtgcagacatacagacagaaatttggtacagatgtaaatatatttccctaaagatttcaggaactgggtttgtgacttagttgtcaatgtgcttgtctagcaggcacaaagctctgggtttgatcctcaacactgaataaactgggtgcatctataatttcagcctaaggaaggtagaggcaggaaaatgagacgttcacagtcacacagtctatcataccaaattttaagtaagactgcaacatataaaatactgtctctaagaaaatatacaaaaacagtgtttgaaatggggaatagttgcacaggaggaagcaggaggatttgtttatagagttctaggtcccctgggctagaaagtaaattgtgggatatccaggactacagaagagaccttttctcaaaccaaacaaaacctaagaagagcttgagaacagacatgtagtctaaatctattaaattacagcaaacaaacctcgatacaaatcattccagaatgaacaaaggctaaaaagaagtttgatcttattctgaagtgatgggaatgacaaaaaatggaattgttggaaaaatactaaatacaacacccttctacttctcttggttttaacaggaatatagttttctttttaaaagacacaggtctgtattttagatctatagacatctcagattcagtcatctcaactacccctcaagatttatttttactttcatctgtatgtatgtacctgatggcctcaaagggacaccctgatatgttcttcatagtgctgtgaactaccatatggattctaggaaccaaacctgggtacggaagtaagggttcaagtgctctaaatcagggagcaatctctctggtccaactactttttttcaatgcacgaaccttaatattattaaggttttaaaagaaaaaagtatccaaaggaaaaaaaatgccattgtaaacattttacttgatttttcttaggaaaacagaaacaaaaagaatggtatagtatgactattataatttggacataatggacaatgcaacgcttaaagtaacattgtaacattaaagcatacataggtgtagttaaacactttttccaaattaggtgttttccaagtttggcattctttaggtttgggttttctgttgttgagacagggacttgtctctctccagttttcacagaatcaccaaaaaattaattatagcaccagttacagaactcaccgtaatcatattatctgaccatatcccattccaatgcataacaacaaacagctaaggataaaataatgcattaagaaatcgagataactaaaataaatgatcacctaagtaccagacaaattgcactgaaaaaaactttacaaatatacatgaaataaataacaccactaaaaaattattctggtattttgtgctttctggttaaaaaaaaaaaaagtgcttttccttcattaatcctttagataaaaaaggtaatttcctttaacaacaaaacttttctgtgtatttctttctgagaacaaatattaactgccatagtctaagagctagtaattctcagctagctacttaggaatctaagggctgttaaagagaaaccctgtctcaaaaaacaaaacaccaaaacagaaagaaaacattaacccattgtacatttaaatattccaggctctaggaggcagagtcaagtgatctgacttataggacagtcttgttctacatacatagttgcaacacagtcagagtgacaaccctgtctccccaaaaataaataaaaacacaagtatgcataactaaaatgttttaagaagactgaagggaactactgaatgattatgaatagtacagatgaagcaaattacaataggatcattctggcttaatctacgcagcatgcagaagaataaagaattctgactttcaatcgataaattattaaaaaagcagtaattacaaatgttgcatttgcttaaagagaattaaaatatatttaaatctcatctaaaatataacaagatgttttttttttcacataggatcattatcaaaaaacaataatcatgctactctaaaggtagtactgaacaagaacactgaagagaaccctatgaggtggatttcatgaaatcattgcctacttgccatcatttcaaaatgcatgtaatatatttgaacagtttatgggcccattcatggtttttgatattacaggctactagaaaccaatcagtgtatcagtattaaacatctagcccacatgactataaatctaagtaaacttatgttacatatattccacgttctaaatctggtctgggaaaatactgagtctactaagtaaaccttacacctagagaaatacaagaaagaaatacaagactgagttctggttcgtacgtgtttaactgtcaaggagagagtgctagcatgctaggccagggattaaacagctacagcttaaggctgaaaaattcaagtaatccaaaacagaaacaaccacagataattttatcttctttgactcaaaatttagttgattaagtttaactagttatattacactgaaaaaaataaatccaaacaaccattaaaacaaattctatctttgtacatttaattgtatttcaaagacaaaaaaagtgaaaaataagtaactcaccttcagtctgttgggaaagtcgtgtttgcaaatctataacaaaagagaattctacagctcagtgcaggaacaatgaagagcctcaactaacagggtaaatgtcaggaaagtattaataaaagaggacttcaacagcagggtttattagaataaacttatcaaaacctggcagcaaaacctccttccccattcctcattgagaaggctttggggccttttgttgcctcatatcgtggaagttattcacctttcctcctaaccctaatacatcctttcctatcatatgtgtgctgcactgtgataccacagccaggaataatgggaaatggggaaagggaagcacaccggcgagaaaatatgtgaaacaccctgattgagaattcaattccaagtacttagaaagtaagttttcttttgttttttcagtggtaataagcactaagtatttcagaaggttatgttaaaatggtaaaccttaactaccacacacataagggagctagagctaggaccatgttccctaatttcccaatttagcaataactgagaaagagacaattgcaacaatgtggaatttatctttttatgagattttcagaagccgggcagtggtggtgcacacctttaatccccagcactccactgtcagaggcaggtggatctctgtcagtttgagaccaggctggtcaacaaaagagctagttctaaaacagcccccagaaccacagagataccctgttttgaaactgccacccctttcctccccaaatttcaacttgtcaatggtttctagcacaggttaacaatttgatgtaagtttattctctcacatatgatgaaaattattgtttctacactggaaagcattttcaacaaatctgtatgagctgcaaaccaaattcaagcagctaataggtgtggccaatcagcaacaacagagtaggagtcaggcaactctctgcttgaggcgagcttgatctacatagtgaatttcagaacagccagctaggggatcatcacagtgagaccttgtctcaaataccaaaacaaactcctgcatttctgcaaagctactacagctaataaaaacaccataagaaataaatatggcattattagtgatgaaggaatgtatttatactaaatgaattaagatattaatatagaaccagtgtcagaaacttaaaatacaatctctcttcttcaccccaaataggtgatgctattaattgccaatcccgattatgatgttaaaaacaactttggagctaggtggtggtatcacacatctttaaccccagcacttgagaagcagaggcaggcagatctctgtgaatttaaggctccaaaactatagagaaaccctgtctggaaaaacaaaccaacaataaaacctttggctacttttaatacattagtaaactaagcacaaattgtgtattttacacaaggaacattagaaaagttgtattatctaagggttttggaacactccgtaaatcccagtactcaggaaaggcagaattaagctcaatgcctggctgtttaaagcagggaacaaccacatgtggaccacaccaccttgaatgagatctggtgccagtctgcagggcacatacaggcagaacactggatacgtaataaataaatctttaacataagttcaaggccagcctcggttatatacacaagtctctaaagcctgggataccccaaaaagagaatactttgagggacaaggctgaccagcagaataactgagttgtatgatacagagcaaaattgaagcaaaccagggatatccaataacatcctgtctcaataatgacaatctggatataaacctaatacataaatgagaaagctgcaactctgtccacagttggatctctgaatcacatgtacatggtggaaggatagagcaacacagctaaaatgccctctgatctccacacataaggaaagcaaatgaaactacacagagacacactagctcccaaagtgaatttctctttaaatgtgtatgtttatttttgcctggatgtatgtctgtgaaacatgggtgtcagaaggcatcatttcccctgcaagaggagttatatatagttagctgtgagtcatcaggtgggtacatagaatacacccagaatcctatgtaagaacagccaatgctcgtatgccactatgaagcccttacacctaacaatttcactaaagacaacccggacaaatcatcctgagggttagtaaaagacatatttttttttattttttaaaaaatcttctaaatctatttatttattatgtatacaacattctgcttccatgtatatctgcacaccagaagagggcaccagatcgcataacggatggctgtgagccaccatgtggttgttgggatttgaactcaggacctctggaagagcagtcagtgctcttaacctctgagccatctctccatcccaagaaatagacatcttattcgggaaatagcatgatatatatacctcaggttggcctgggactcatttcaggacagtttactcatagaaacatagccactaaagttacatggattacaggagtgagcagaccttgccaaaccttgctcctatgtcctcaccttcatgttgagaaatcacgttttcacagagtaacctaagactatgagaaatgttatttatcacaacatgaggaaatgtaaaaaaggccacggcaataaggttaaaaaccactgctctttctaagagcacccttttttcaaatgaaaatttgaccttgaaagaagggaagtaacaatagaacagttttcaagttaaatcattatttttggtggcaggatctcgctacacagtccctgctatccaagagctcacttggataaaacatagtgagctttgaccaccaaagcactgagattaggggccggagagagggctcagcagttaagagcacttaagagttcttccagaggtcctgagttccaattaccgacaaccacatggtggctcacaaccaccttgaatgagatctggtgccctctgctggtgtacaggcagaagactgtatacataataaatcaaacacacacacacacacacacaaagcaccgagattaaaagtgaacattgccagatttagcctatcatgtttttttgtatagctttggagcctgtcctgcagcccattctgtagacctggctggagacaactaacatccgcttgcctctaccttccaagggtgggaattcaagaagcgtgctagcatcatcctgctgtatcgttttttaaagaattgttttcatctttctgtgtagaggtcaatgtgaatgcatatccaaagagttaaattcatcttaacatcccatactcaaggaaatttctaaaataaattcctttcaattacagaaagctgcttggaatgactattaattgactgcacaacaaacaaacctaacattaaggttttaaaattcaaaagcagaaatacaggtaacagatacttgtgggagattaccaaatagtgcttacagaaatgcctcaatgattacttttacctcctcataattaattacattggcattgtcttcagaaattgtaagttgcataagattttaaaggacaccatttgacaaaaagaaagtctttcttgcttttaaagtgtcaaaatatgaagacaagatcactaacttcacatttcttaaattattttgaagtattgcatatggatgaatctgttggcaggtattgtgactggacagggacttaaagctagtgctgggaatttagatactttaaaagagcagtacatgcttttaaactgaggaaaaatctgaagcctcatcctcatttgttttggttttgaagacaaggttcttctgtgtaacagctctggctgtcctggaaatgtttatagagcaggctggcttctaagttacagagatccaaccacctgtctacacctctcagtgctggcattacaggcatgtatcaccaccaccaggcactggcccctacttctttttttttattgtgccctaggcatgaaacagctttggccaccaaaccaggcatcaagctaggatgaacaaagggctactagctcctctgcccctgactgatataagaacaacaccaccaccaaggtgtctctatgcccattgccaggggttcatccctacttcttaatggcaaaataaaattacctgctttagatagctttgtatctaagcagatttaataagaaagcacaagtttcttattacattaacattactacttatctaaaactgcacatggtcttactttctagaaaacttagaacagaaattactattagaatttcagaacacttgataaaacagggtctggacactgccacccaggctggcatggaaatcatggtaaagcagcctgacttttttttttaaccaaagttggtatagcaaaagttattattcatttctatccaagacatatatataaagaaacaagtattaccctaggtcctagatttaggacaatgtaaatctctttttaggatttacttaatttctatttgaatacaacttttgcctccatgtatatatctgtaagacatatgacctgcaaatattagaagacatggatagatgtgacaatactggagattactttagaaatattattattattattgcataaagcaaaagttaattttaaccaactctgggcttttcctaaacattaacaattcagtctaaaacttcacatgtttccatagtctcatgggtcactctggctaatactaaagtatactaaagctactcttcttttgcaaccattaaggtgctagaagtacttaatgaattgaattctcagttagtcctttgaaatgcaaaaaatttggcatgttttcgaattaggtgaaaaaacaaatgatttcaaattagaaaagattcaattcctacctgccacagcaccaaatgccaaagagccactcatttgtaaagcttgctgtgctgctggtggaatctgcaaacctgtacctgtaaaagagtaagtcttaaagttcttactatgttaacggcaaaaaaccccacaattttgggaattatgttatcaactcagtcatcggcaaaatggttcactacaccaaggtaaaataatcacaactaacttttttttttggttttttttttttttctgtgtatctttggagcctatcctggcactcacagagatctgcctgcctctgcctcccgagtgatggaattaaaggcgtgcgcaaccaactcgaagctaatcacaacaaatttcttactgagtctggtgacacacaaaataaaactcattaaactcacagtagtacacaaaaacaccaaaataaggagtatataaaactttaataaaggtaaagattagaatgcactcctacaaatatataggaactccaaaacaatacacctgcctgcatatttcgtagtttgcatggttacctttctttttcaccactatacctatacatcaataattgaaaacttaccctctgcaagtctcgccattaactggagacgaccagttgttcccaagtcaattccagttctttctagttcatcactgtccaaaaatgaactagcactagaagcatcagttcgttcagtaacatgaccaactttcattggccttccagctagttcaaatccattaagctgttccaaagcttttttggcacattctgagtcagaaaactagaatagacaataggaatgatacaattgaatactttgtatttgtatcactacagacataacattgccttcaagtgcattggtgtcaatttgcttgaatgcacgttgtgagggtgtcagacaagttgtgagctgccacatggctgcttggagttgaacgcaggtcctcttgatgagcagtcagtgctcttaacaactgtgccatctatccagcccccaaaatagcaactttgtaagtctaattacacactcatgaaaaagtacaaaaagtatataaaaattgtgtacatgtaaaattagaccataaatttttgcaaataaaaatgcaagatagtgtgaaaatgattttttttaaagaccaatttttacttttttgacaagttgtctttacataagacatgacttttttatttttatttttaaattttttcgagacagggtttctctgtggcttgggaggctgtcccgaaattagctcttataaaccaggctggtctggaactcatggagatccatctgcctctgcctccctagtgctgggattaaaggcgtgcaccaccaacgcctgggcccataagacaaaacttttggacaagtatttactatgtagatcaagctggcctttaactcctccctccctgagactcataatttgttccaaaatgccaagaaccctatgtaattttttagtgaatctgacagagtggaaaagagtgacaggcacctaggatcttaaacgtgtaacatgattacccaaccaaccaaatctaccaaaggtgttttccttcacacctctcctttagtctccagatcccttctcactgtctttacctctttctaaacaggggtaagaggatcctgccaggcagtggtggttcacgcctttaatcccagcactcaggaggcagaggcaggcagatctctgtgtgttcgagaccagcctggtctccagagcaagtgccaggataggctccaaagccacacagaaaaaccctgtctcaaaaaagcaaaaaacaaacaaaagagctgggtgttggtgggtcatgccttttagtcccacactggggaggcaagctgatatctgtgagttcagggccagcctgtctacagacagcctccaaatccacagagaaaccaatttagtttgtgcttttaacgccaggatatgggaggcagatcaagtcatttgttattttgaggcccgcttggcgtcttccagttgctagggttacactgagaggccagctctcaaaataaacaaggacataataaataaataatcaaataaatgtgggctccaagttagaggtagatctgataccactatactctatgtgcaccagaatttaaatgcacaaagcaaactacttgaaaatactaatctttcttcattcccaacacatacagttcacatattgtgttacattaagagaactacttactgtaatgaatccatatcccttagaccggcctgtttcactatccatcatgagctgaatactttcaatctaaaatttaatggcataaatttaggcaaaattattctgtgagctatagttttaaaaaatctgaaatattctgtacccttataccccagccctcaagtaatgaagacatcacaaccattctttacaaaaaaaaatttttttttcatggcctagaatttttaaaaattttcccactttgacagggaaatactgtctggagtcagggaactaaacaaaaaactaaaacttacccttccaaaaggctcaaatatcccccgaagcatatcttcagttatgttaaaatgtaatgagcccacgtagagcctcatgggtccagcacttcccttttgtaaattgtttgccattgcagcagctctgtttttttctgcctgtaagtaaaacccacatcaaatactaataaaaagcagaaatgtgtcaatgacaaaggagcactaagattggaaagccaaaaactatgagtaaaaaggaaaaaaataaaccctaaattgattgctaggaggcactgaaaatacacaaatctgtagaagacatttgctaagaactagtgtaaagagaaacatcatcagaaagatgtaggtgagatatataccatgctgtgaatgtcattaatggcactaaattgaatgcaagagttgtgacacagcatattaaactcaaatgtctgccttctgtgcaagcactctactgagctacattccattaccctaaacttttgcactcaatagcagatgtgccaacggtggtattatacaatttttataacgtttaaagtatatgacaattatatacaaaactatatactcatgtttcatacctatatgtaatccactataaaacttaaaccaagtcaggtggtgagggcacaagcctttattcccagccctggtctacataacaatttgcaggatagccagggcagttacatggagaaaccatgtcttgaaagaaaacaaataaattaagccaaaatatcttgttttgtgatatcacaaccagtgaaaaatacaaataatctgtttactgaatatttgtaaacatataactcattattagacataccccaagatgagtttgagagttgaatgaatgtcttagcaaaccatgactaagtgtttgaagaaccatatacatagtcacctaagtaaagcatagctattttgtctctattaagacaacctttttttttttttttttttttggttttgacacagggtttctctgtattgtttgagggtgtcctggcacttgctctggaggcttttggaggactttggaggctgtcctggaactagctcttatagaccagcctggtctcgaactcacagagatctgcctgtctctgcctcccaagtgctgggatgaaaggcgtgttccactaccgcctggctctattaagaccttttaaaactttttatatgctgtaggtgtttgtctgcttcagaataggccagaaagatatcaggtccgatgaatcgacagccacaaaacagctgtgcatgtggatgatcaaaatgcagaaggtggcctatagccacagcaagtgctctttaactatggagccatctaaaaaccgtagctacattaatactttctaaattctcaatctacattataaaacaaactatctttctaataacaaactgctagagagcactcactcacggaccagtgcttcccacacaatgatgtaaactaccatctcattgattccacttattaggtctgttaatgaataattaatacatagcccaagctgagtcaaattgattccaattctcctgcctaaccctaagccactgctgcatatgctgtgacacccagctcaatgaccaatatctaaatcaagaagttacctgtgatgcctgtactataattggcactcctaaaacacgttggccagttaatccaattgctagaggcactgaactaacatcaacaaattccacataggcaattcctttggaacgtcttgaatttctatcagaaatcatcctcacatctcgaacctaaaatgaaaagaaatataattattctatagtcaaacaatccacgtaagtatttcaaacatactatttcttcagaaacagtgtctcaatcaatacatggcaccagggttaaacgttttgtgtagacttgattacccttaaattcacataattctgtatacctctgtcttcagaatgccaaaattaaatttcagtagtcaggcaaggtgttagtacatgtatttaaaatagagcactaaggatatctctaaggtggatttctgagtttcaggtgagcctgcactacacaatgaagactcaataaagatagggtgtcagagcctggcgttggtggtgcacgcctttaatcccagcactcgggaggaagaagcagatggatctctgtgagatcgaggccagcctggtctccagagtgagtgccaggataggctcatttttagagacagagaaaccctgtctcgagaaaaaaaaaaaaaaaaaaaaaaaagatagggtgtcagtatttatgtccatcttatgaaaacttatatccttctacctcagtaataggattacattatccaagaactgcttctaaaaataattggagatgccctgcatttgtggtacacaccttaaatcccagcaattgggaagcagagacaggcccagcctggtctacagaatgagttctaggacatgacccaaagctacagagaaacccagtctcaataaaaggaaacaaaccagcttggtctataaaagctagttctaggacagcctacaaagccacagagaaaccctgccttaaaacccacccaacacacagaatttggtctgcctgtgactccaagtgattaaaggcatttgccaatcaccccttccgtttttattgaatctattgaaattacctattgctgttatccttgagtacattccaaaatttgaagctaagaccctattgttaattatataagcacaatgtatggaaataggacttggaggaatttggctgaactgaactggaggactctctcatagtactggaaggagctaatacaagcttccaagggagaaagcaatcaatagtcttaccctgctgtgacacctccaaaacacaatgatgatcaacaggaagatttcccaaaagatacaatgtggcactttgttgtttttccagacacggtttctctgtattgcgctggagcctgtcctggaactttcgctggattaaagttttatgttagggctggggggatgcctcagccaatgtggcactttcatcttgaggattaccacaaactgtctatttgaactcacagctgactaaacagaagagaattcataatccattcctgcaatgtaaacttacttaactgcgtttgatgaggccaaagaggcaagaaaataagctaataaggccatttcagaatgcaaccactaaatcatggggtatccaggcctaaatgatacatttgtaacacatccctaacttaattatgacagggaagctgcactaaggaaatgtaaacaataaagcaggaaaacaagacataccaaggtagacatggaggtccttagtattggttacccaatactaagtattatttgaataaaactattaatctacaaagaccactaaatgtactcactagaaatacacacacacacacacacacacacacacacacacacacacacacacacacacacacacacacaaataatagctattattataattagagctgggtatttgtggcatgtctttaatcccagcactccggaggcagaggcaggtagatctctgtgagtttcagaccagcctggtctacaagagctagttccaggatagcctccaaagccagagaaaccgggtcttgaaaacaaaacaaaactcacctttttttttttgagataggatttcactctggccctggctgtcctagaactcaatctatagacctacctgagtgcctggccttctgactgccaccactgcctgtgtgcctcacttctaccaacttaacagtctcttataaatggggagttacctttcctactgtagagaaaaactcttccaaatcccttggtcgaattcttgctgccagttgcatgcagaaaactgtccttgcatctctttcctcaggagttagattatcaataggttccctaagaggagaagattacaaaattaataactgcaacattttttagtgggacacaagattattttgatcattggtagcctcaaaatccagttctttgttttactagacataagattttcttgccgggcggtggtggtgcacgcctttaatcccagcacttaggaagcagaggtaggcgggtctctgtgagttttaggccagcctggtctccagaacaagtaccatgataggcttcaaaactacacagagaaatcgggtcttgaaaaaccaacccccgccccattaaagcctaagaagctagagggttcagaaattaaggacatgtattgctcttctcaaggacttaattttggtgcacagcaccatgttgagtggctataactctagttccatggcctcttgggatagcagcattaacataaatacatttgtattaaataaacattttttgttctctctttactctattttgaaacactaattcctgaaaagtcttattaaagtttaccaagatatcagtggataattttgtttgtaaagttgtagatgaaatcatgatatccaagtgctgtaccactggtacacttacaagtcccacatgttaacgtcaaaaggtataaaactgaattagattttacaagtaaacagattactaagaatatcacaataagccgggcattggtggcccacacctttaatcacagcactcaggaggcagaggcaggcagatcactgtgagttttagttctaggactaaagccagagaaaacctgtctctaaaaaccaaaacaaactatcagggctggagagatagctcaagagtttaagcgcactaactactcttctaggtcctcagttcatgtgccaacagccatctataatgagatttgataccctccttcttctggtatgcaggcatacatagacagaatttctgcttataataaataagtctttaaaaataaataaatgaaagtaattgtaaatcttccccttaaggtcaacaaggttagtgaagtatgtaccgtattacaaaatgtgccttgaaacaagatgatcattatagtctaaacttactgaggaagaaaataagttgaagaatattcaatgatcattatgtaaactcaaaatgttttggtgttttgtttgcagatggggggaaaaaaaggtcagcggttacctcacagggctcttgtcttttctgaatggacttttgcttcgggaacgtcttctgctgtaagggtaaaaagtttcacaagttacccaaacaagtaatgtctcattagttccttgaaaaacaatttaagcaattcagaagtgtgtttaaaaaccttaatttgatgctatgaggcaacccaatctttcctcggatggcactgttaaattttggtccggagctaaaaagaaaacacaaaattacactagttacaggtttagggtcttgccaagatcaagttcatgggctctccagcaagactaacattgtttaggctgcttcttttctacatcaactataaaaaggaaacaaaagaacttagaaaaatttgtatctttatccctgacctgaagcccttgtatttatctatcctggatgagttagaggtgccaagaacaaacgttacagcttcaaaattttctcactctaaaaatggattgcatctacttttagtttttcaaccatgtaattatgaacatgagttgttaaaatttagtagagtaaaaacaaatgattctgaaccctcatcccagcatcagtttactatacagttctttcttggaaaaaatatgtacttatatgaactcactctgtagtaaagaatgaccaagaactcctgttcctgcattgctaatctctgggaggatttaaaaaaaaaaaatgcatcaaaccatgaaaactggtacgttccatataatacatccctttctttttttaagacagaacaaccctcatagtgctggaacttactatattacatatcaggccagcctcacagagattctacctgcctctgcctcctgagattattattattttttttttggtgtttttcgagacagggtttctctgtggctttggaggctgccctgaaactagctcttgtagacccttggccccccagtgctgcgactaaatgcatttgccaccagggcacggacttttaaaattttatgacaggttctcactgtgtagtcctagttggtggaactcaaaaaagcctatctggagtgctggaattaaatgcatttgtcaccatactcagctcccatgtaataattcattttattacatttttaactatttttaaaattattttatgtgcattggtgtttagcctacatgtgtatctgtttgagggtgtcagctcttggaattacagacagttctgagctgccatgggagtacctggaactgaacctgggtcctttggaagagtagacagtgctcttacccactgttggcactgcaactcaggacctctgaagagcagttagtgctcttaagctctgaggaagctctccagccctgatttatgtttttaatgcagagtatatccctttgtagccctcacccacttggaacaggtaacaacatcatcagcagcaagaacaaggaagcaaatcagaattctaaaaggttattatcctaaggagctaaagggttcagcaattaaggatatgtattcctcttcccacgtaaccagtgttattaaatgttgagccatttttctagctccccccaccctcttttttatcaatatggactagaacttagctgtgatcctcctcttccttactaacccctaataagataattactggaattcatgtaatcatataaacaatttttataacttatattttatgtgcactggtgttttgcatacatttacgtctgtgtgaaggtgtcactgttacagacagttgtgagcagccatgtgggtgcagggaattaaaacaggatcttcaggaaatgtctgctcttaaccccagaaccatctgtctagcaccataaaaaagtaaaatttaacaaggcattttttatcctgttacaaattaatacagattggtatttaggagtcagggtatcactatgcatccctagctgacacatggtaaagtaagccaactaggtttctcctttagttataactgtggagtccagttatagacgccacagttcattgaaacccaacaccagtttaaataaagtcagactaggataagaagcaggcacagacagacatagacaccacagacactcacatatcacccatccatactctacaaatggtattctcatgttttggggtttgtttgtttttgagacagagtttctctgtgtagctttgtagagcaggctggcctgtaactcagagatcccccgcctttgtctcctgagtgctgggactaaaggggtgcaaccatcaacgctcagtattctaatttttaaagaaactatatccatttagttcatcctggtaagacaattaacaatcctaaaaaatgtagagtagcagggcgttggtggtgcacgcctttaatcccagcgctcaggaggcagaggcaggttgatctctgtgagttcgatgctagcctggtctacagagtgagttccaggactagctccaaagcaatacatagaaaccctgccttaagaagcagagaatgtacagtaactcttgaagaagaaacaatttctaatataaattcagcattaaaataccatcatggctctagtaatcatcatgtaaagtcttatagtaaagttacttatataagtaaagttacttatagtaactataagtaactaaaaggaccctataacctataaatatgggaagcatccacagactcaggcatgcatactaataaatgaaagccaatattctgagtattttgtagacaatcttcattactcattatgtccaagtgaattccttaacaaaagtgaaggggttgattcagttgagtgtctttgaactcaattcttaactacttcaacatttagaattaaacagttaagggcaatactgcttccacagagttcctgagttcagttctcagcatccacaaatcaagaagctcacaaacgcctcttaactccagctctagaagtactagaagtagagtgtagtccaatgcttttggcctacatggacacttgcactcactggcaacacacacaagcatatgtacatttaaaagtgatttacaatggtgtgcattttaaattgacaattgacaaaagattgttaattgtcttaccaggatgaactaaatggatatagtttctttaaaaattaggtaaggaccttgcttctttcaatcctttctcagaaatgcaatttcttcccaaaatacagatgaattttatgtgcattggtgctttgcctacatgtatgtctatgtgaggttgtcagggaagtattagaactgattttacagcctgttgtgagcagccttgtgggtactgggaattaaatctgtgtcctatggaagagcaatcagtgctgctcaaccccagccatctttctagccccagatgatttttttttcataagtgatgtcatccttttttaagcacagggtttctctgtggctttggagactgtcctcgaactagctcttgtagtccaggttggttgccaactcagataagtgatgtcatcttaaatatccttaaataatgcatgcaaatttttgttgtttttgagacagcatttctctgtgcagctttacagaccagagatctcacatagatccgcctgcctctgtgtctcaagtgctgggactaaaggtgtgggccaccactcccgggctacaaagcactttcaatttaaaggtttaaatacaaatagttaaaataatgagcctaaaagttgagaacacaaaatggtgacagatttcagctcaagacagccacaaataagattttctatccaaaactatacagtttagacacatattttgtatgatgagtgttctaatggctcacatactttaggttttctctatcaagtactcaaatgctttattttaatttggactggcaagcaatcaaagctggtcaaaaaatgttggtagttctggtagtttctaagtttttatataatcaatccacatactgtattttcaccttactaggggtcaatgtcagtatctttcattttaaatctgttattggaaaacacaatctcataatgctttcagttaaactattatctaaacacctgcaacaaaagtaattgcagttacatactagggacttctgtagcggcctcggaatcttctatctcgacttcgtgagcggcttcgtctcctttctttgcttctgcttcgtttccgttcacggcttttgctctttttcctttctctatctctacttcgcttccgttccttacttttgctcctttttcgctcatgactacgacttctgctcttgcttttttttctcctgggggagggaaaagtaccattatcatgctggtgtaaatactaagtaatatatacttccttttacggtcaaaatgtttatccttttgtaaatgtattttttaccactgtacaatggtacaaaatcatactttaggaaaaaattcctaggcatgggacctaaaaccccaacctttgcttcatgttaactgaatacaatcaaagaattgagagacaggtttaagaggaagaatttgcaatcatctcctgaggcagctacagcttgaaacaagagaccgggacttgctggtaagtagaaaccaagcctcaacttcaaaaacaatataattgccattcccctaatagaccaccaagcaaacagtaataaaagttacagtatgttcacatttaagaaatagtaattgtcatgtgaaaaatttccatacagtaatttagttcaagtcaattttgacacaatgtacatgtagtctgaactttcaaaacaccatatacatagcatttttgtttcataggaaaaattataagaaatgataaaggacattaagaatgcagtaaattcactttaacaagcccagttttaatgtgaccatttataaggtttccacttaaagctaggataaaaatggaaaatgccctttttaagctagtttatacaagcctatgggataaattaaaacaacttgaccttccttggaaaagtaaaaaaaagcccatcacttatcttcccatatatttctgtgttcctcacaatatttcacccactggtttaataatgaaaccttgaaatctgttcctctgtcatcacccaaattagaggtgccttcagatatttcaatgtaaatgaaagacatttcaaaataaatttattccaccaaaatgtccatttttaagtggtttgaagcctgaacattttgacaactctacatcattaggaaaattaattagctatttaatctgtatcaaagcaaagttagcacaagaaccactgaggcatgcctcagagaacctgtaagcaggtcatcttagagtgcactgaaaatagaaaatggaaacacccaccttctggaatctcgaaacccacactccaatcacaaggagatgtagagctttccaaggaggcagaaactttgtctaaaatttcaagataatccacctgactgtcagaaatatgctaggtagcacatgacacaaaattaggctacactcatttatacagaagtcaaagcaactccaatgctcaaaagggcaacaattaacattccaactttgatgtttcaaacactgacactatttcttaggactaaagaattctgaattctgtaaatcctaccaaattaggggacaaggtaaaaattaatttcattcccctggggggaaaaaaagacagcaagtttttgctctgctcaaaggcggcccacagcagagtcaatcttagtctgtcaaagaaacttaaaaaataactgagagagctaattttaactcaatgtcttgctagacgtttcataagcaaatccccacccacatctgaaggcaaccccagataggtaagtagacatactaagatatcagaaaattcaattttccatataaaagcccagacaaaagataaatgttgcaagaaacaaagatacttctctagagtaaattccagcattaaagaacattatcaactaaagaaatggttataaaaatccatcctaatagtcaaatcctgttacaacttaaatgggactttcccaagtctttagtggcagtggaatttgtactgaacatcattgaagtaaatggtccactgggcctttggactttttggttatatggcctctgctgtaaaggtgttttgctataactggatttgacctcttccatgtaagaagatctaaaatttaaatgcaaagtattctggaaaataagaaaaaaaaaatagaagtcatttattccaaaatttgataatccacaccacagtagccaatatattttaactgtgccattttactgttatccttttctaaatgattctttaaagactttaacaaaataaagtttgacttgagacttgcaaaacttgtcacagcaacatacttccctgaggacgaacctaagtccatagagagtttactggaggccttgacaaacttccgtgttacaactcttcagaaagtaggctaacaggctgttatttcaaacttcatcccttactactgggatatgacactgtgtgttacaagtcagttacaatttttttacacaagagtttatacacatagctaactttgtcagaatgtgaagtttcttctttctaccttatcagcaacaattacctccaattcaataaggttttaacatgagccatacaaaaatgttatctaccttaggtgaacacaaattatcttaaaatgagaaaatttatttttcatccacattaggttcaattactttttgtggcatgttccttcaaataactagataaaaactttgtgactacattaggcaatcacctaatttaaatcagctgtaattaaagaagccttgaacattttgaagatactactgattaaagtatttagggaagtcttcctttaaaacactatgttaaattgcccaactgactctatgcattagacaaaactacaatgactaacccccaccccaaaaagcacaatctctaatataatacatggtgctcaaatgggttataaaagcgtggtgatttttaatgaacttagacacaggattcaaagaaaaaactaaagatattggtggaaagaagtgacattaaagaatgtcaaagatttgcattcaagtttatcctcatccttttcaaccttaagatcaaaatctttactatgtcactataaatatgacatctgaagaaatttttgttccaggattttattttgattataaaattatgaagctgaaaatttaggaaactgttacactggcaaaggttaaaaatgcacgatatgaatcctgtcaacctgctctctgcatccacttctgaccagtatagaacctgattcaacccaatcatgcataagaaaaaatttacactaatcagacctgtgtttcctcttaatattaattcatttttgtattctctacaggatctcactatgaaacccaggctggcattgaatttattatgatcactatgcctctacctaaggagggagttataaacctacatccatacccaaacccacatactaatagtaatccattactacaccacattaaaattataaaccctttgcttagcaaacctaagtaacccattgagcattttctcatctattttatgaaattgtatcaacctacctaacaaagttgttgtgaggatgactgaggtagttactatgatgcactttgagctcttaggaggaaaagagccaaaaagagtcaagtaagtggctattttatcatcattttcattatttatcacggggtcatgatatgacaaacttttggtatggcatcataaacatgggctagaacttaatgcatatgaccatatcatgttaagaatcactaattttggagctaaatgctaattttacaacagctgataagctccaaccttataaattggatcctgtttaaactgttaacataactttgtatattgtattctgtactaagtctatagcatgaagttcttatttcagattactcacctaacccaaataaattacatattcttaacggtctccttagatacactaaagataaaaaggcccaaaacaatgaaggaaaaaattttacaaagaattactgccaaaagggcctttaagctgcaaggagcagaaataactcatagccaattcctttagtgaatgaaggtaaacacagtattttctgtggccttgatttgattttttttccaatgtaagtcttctaattcaatgattatcacatctccaaaaaaattaagccaaagttaccaaatttaaaacattatagaactcaagagaatcatgggatccttgaagggaaaagtgtccagaaggtctctgaaaccatatgctgaagtctacatcgcaaagtccatagttttaaatcctgaaggactttctcatcccaaagggtatgaccagttttctaagaagcgaagaaaaccacagtttgatgctttaggcacaagaacataagatttccaccacaagaagtttagagcccaccctcccaggttccttgttcaaacttactttttgctacgttcttcatggccgttagcactgctcaacttgttctcatcctaagcaaggttgatagaagaacatcatgaggacgaagtggtaacatttcaagttgtcaaagggtaaagggaataggaataagaaaatacaagacaattttaaaactaattacttatttagtctaacatggaaggctataaaaaaaatttagatggtatatgtttaaccactttgttgctaataattaagtcatcaagaaacaaaaaattaaaatctttccacattaacatgttatattttactttcttacattgtttagataataaataagttaaccagagttacaaaacgttgaagtggttattatttttatgaaacatgaagtcactgagttttattccatgtgctattgtcccttttgtcggtaccatggctctatttctgcctaagccccaagtggccatgctagcagccagccactatcgatttcctgtgaccgatgccattcctgagatcttcgcccatttccgctggagggttgggactgtaagagcttgatgccacctctgtcacacatctcgccctgaagcaaacagggattcacactgctttagtaatgttgactcccaagaacccaagaaaagttaattaataattcaccagtccagcctaaacatttcctacttccatacctgtttacatggaattacatccacgttaaactaagacaagaaacattaaaaacagcaaacacgtcttcaagagtctagcattataaattatactattttataactatcagaattcatccaaaaggaaccacatggtcgtgctacactccaaaacaaatgtattattttaaatggtttaagcgcaatgtttatttcaaagtttgaacacatcagctacgtagtatatctgctaagttacagaggctaaggtttgtgacaccagtgataatgcatgcatactgctattttcaccaccaagtgggggaagaaggaagagtgtttacttttactctgatactgaaacgggtcatattgtattactaatcaaaataactcctttgtagtttttagtgtgaaatacttcggcagggcctaattaaaaacaaaatactatggagaacagtaaaacagtcatcaagtgactctaatttgtgacattgcctcttgccttttgttttggtggttttatattgttttgttttggtttctgctaatgtctattcagggatccaagaatttcagtaattattaactgaaaagcagatcagcacctgcctgttttaaggttactatcgccagccttgtatctatttatataaaataaattttaaatctcacccatttcttctttaaagactcgtaagatttacttgccacagactggttatgatttattcttggacccctgctattttcccaaaccactacattcaccttttttgctataccaaactggagctggtaattcttagttgagtcattttacctaggggaccacggtacagcgataagtcactcaattactaccttatgattgacagttcacactggaatcaaaggtgaattcatgggagtagaggtgagatatcgttaggcaagtctacaaagagagatagatgggcatttattcatcacgctgaagtgaaactactgcacaatattattacatcaatagcatatatttacttttgtaagttacacgtaatgcatctctgataagataatcaagagggctccgggaaggttagtttacatttcagcagtagtttcgtgaataatgctaaattaagaaacatattaaagctcactggcatgtttttctcaccttcttgtaaggggcctcaagcatcgcctcaatatcaatatcgtctgccattttctctacacgcctagggaagaacaagacagtcctgttaagtaaacaacgactaattcgtctaaaaacactcgactcctcggcctaaaaaaaaaaaattcagatttttgagaaaagtccttagtttaaaaaaaaaaaaaaaaaagcccgacaacgactaaaactgcgcgacgcacgtcaacaaccagaggcttgacgtgggcgagcaaacgcgaagggctcctccttccagcaaacgcacgggccgagccccgcgtctcatcgcgcagggcggcccctgggcccccgaggcccgaccgcagcggcgtacggagcgcacccggggcttccttccgcacaaaacccgcgctgccatcttagcggcggggagcgccctccgcggggaggggttgtgtaccgaggcggcgttcggcaggcgccatgttggagnnnnnnnnnnnnnnnnnnnnnnnnnnnnnnnnnnnnnnnnnnnnnnnnnnnnnnnnnnnnnnnnnnnnnnnnnnnnnnnnnnnnnnnnnnnnnnnnnnnnnnnnnnnnnnnnnnnnnnnnnnnnnnnnnnnnnnnnnnnnnnnnnnnnnnnnnnnnnnnnnnnnnnnnnnnnnnnnnnnnnnnnnnnnnnnnnnnnnnnnnnnnnnnnnnnnnnnnnnnnnnnnnnnnnnnnnnnnnnnnnnnnnnnnnnnnnnnnnnnnnnnnnnnnnnnnnnnnnnnnnnnnnnnnnnnnnnnnnnnnnnnnnnnnnnnnnnnnnnnnnnnnnnnnnnnnnnnnnnnnnnnnnnnnnnnnnnnnnnnnnnnnnnnnnnnnnnnnnnnnnnnnnnnnnnnnnnnnnnnnnnnnnnnnnnnnnnnnnnnnnnnnnnnnnnnnnnnnnnnnnnnnnnnnnnnnnnnnnnnnnnnnnnnnnnnnnnnnnnnnnnnnnnnnnnnnnnnnnnnnnnnnnnnnnnnnnnnnnnnnnnnnnnnnnnnnnnnnnnnnnnnnnnnnnnnnnnnnnnnnnnnnnnnnnnnnnnnnnnnnnnnnnnnnnnnnnnnnnnnnnnnnnnnnnnnnnnnnnnnnnnnnnnnnnnnnnnnnnnnnnnnnnnnnnnnnnnnnnnnnnnnnnnnnnnnnnnnnnnnnnnnnnnnnnnnnnnnnnnnnnnnnnnnnnnnnnnnnnnnnnnnnnnnnnnnnnnnnnnnnnnnnnnnnnnnnnnnnnnnnnnnnnnnnnnnnnnnnnnnnnnnnnnnnnnnnnnnnnnntcaaggtcgccatgaggcgcctatgacagaacgtagggccgcggggtgagcgttcgtgaggacgcgcgcaggctgcgcccgagtggggaataaagacttccgtgtccctgtcctctggtgtcgccgctgagaggcgaccgccgtgctgaagccacggaaaacaccgggaccctgacgagggcgggcggggagggaagaagtgcttcttccctcctctccggttccctcaccgcgggcggccttgtacaccctcagttcagtgggctgtgcgtcaggattgaggctttcttggattttggctgtccacgtgtaaatttaccgcttttttaatctgttttttcctggagtttttttttgcggggggggcgttaatactgtcgcagaggaaaagctgcgaggtcattgtaacttttgtttccccctttcataggaaagcaaacgtttaaaaataaaatgtgaaaccaattttgaaccctgtcagcagcttgagggtctaaaagagtcacagtgtgaacaccttgattggtgtgtagcttctgcaacgctgtgtgaccttgggcgagtcaattaagctctcggggcgtatatttcacttcctcctcataaagaaggagggagaatattgtaattagtagcaagggaaagcttgacactgaccaccaaggctgcaaatgttgatggaatgaattccaggtttagcagggaatgtctatccaggtgaactccatgaaacgaatgaaggctcattaggagaaggggtgaggaataagcgacatgatgactgaaatgctggaaaaataatattttcatcattgaaaacttctagggctgacaatgcagctctgttggcatattgcttacctagcatgcctgatggagcatgtctgtaattccagcactcagaaaacaggcaggggcctctttgtgaacatgagatcagcctactgtggggagctccaggccagccagaactacaaacaagacctagaggacatgtaaccataaagagactcaacactcaggaggcagaggcaggcagacctctgtgagtctgagtccagcctggtctacaaagcaagtaccctgacagccagaactacaaagagaaaccttgtctggaagaagaggaggggcaggtgaggggatgggaggttggggggagacttgctttctctctcagactttatagactgcctaagatccgggatagctccaactgaaaacctacacttcccaacttcccacccagtaaggggccctagtccttcctgcaggcattttgaccatggggtggaggcagacagaggtggcccttaccatgaatgaggatggtcttgccctctgttctctttagagctgtccttaacaatcctgtcctgggatgacaaatcaaggacaacctgtgacacctagtgaaagcctatgaaaaggacaaaaggggagctggagagaaggtagttaaggtcactgactgctcttgcaggggactgggttttgattcccagacttcatatacaaactagagtttgagaggatctctagcccagtggtggaggcgcacacctttaatcccagcaatacacccctattcccgaggcagatctctgtaagttcaaagccagcctggtctacagagatagttccaggacagcctccaaagccacagagaaatcctgtctcaaataaataaataataagtatgctggatctgtatatgctatggtttaatctacagtacactttaaatacttttctactttcaactttcaggcagaagtatattttcttgttttcatttgttttttttttttttttgttttgtttttttttggtttttcgagacaaggtttctctgtggcttcagaggctgtcctggaactagctcttgtagatcaagctgggcttgaactcacagagatctacctgcctctgcctcccgagtgctgggattaaaggcgtgcgccaccactgcccggcctgttttgtttttcaaaatagggtttctctgtgtagctttggagcctttcctggaactcattctgtagaccaggctgtccttgaaatcacatagatccacctgcctcttcctcctagagctggctttaaaggaatgcaccaccctgctcatgggccagatgttttatgacctggagggaatacttgtgtttatatggcttagctgctagagtagcaattctttagaaatcaatggacacaaggaaccttttaaattgtctcttgtcattggttaatacttcttgctagcttataatcaagaattccaccacagttagcaacatttgaaggttgctgacatagaaacaatattccttttacatacaattttcaaatgatgctaaaatagcaatgaaccatgcttaaggcctaagtatattggccttgaagtgtggctgtattactttcccagatattttcagagaatcttacaaactagattaaacatttgttaatagttaacaaaaataaagaaaaaaggaggaagaagcagcagaagtagtagtagtagtaatatatttggccaggcggtggtggcacacacctttaatctcagctctcgggaggcagaggcagaggcaggtggatctctgtgagttcgagaccagcctggtctataagacctagttccaggacagcctccaaagccacagagaaaacctgtctcaaaaaacaaaacaaacaaacaaaattattttatttgtttacattggttttttgagtcagggtttctctgtgcagctctgattgccccgggacttgctttataaacaagaccaggatagcctagaacagagattgtctgcctctgcttccccaagtgcgaggattaaaggagtgtatcaccatgccagtctccaaaaaagaaaaggtcattttgcaacactttgagatataacttcaaaagctacaaaacactatagctaccttaactatcctaaaaagctgctctctctcaccatttttttttttttaaagccaggatctctatgtagcttagaagtcactctgtagaccaggctggcctccaactcagagatctacctatctctgctgttattgttttgtttaaaaagaagaaaagagaaattgctgagacagacatattgactataagtttattataaggcccgtcagaatggggagactaagaggaggaacaggggtaaatggctgaccgccatggccggtcgccatagagagacagagcggggaaacagagacaggagagcacgcagagagagagagagacagggggagagagagagagagagagtaaaggggcaggagcttatcttttaaaggggtcctctgcacctgcttgcagacttctttcccatggaacctcgggctgaccagggtattgcctgagtggattccaccaggtaacaggggcaggccagcataatgcctgaacctttcatctgcctcccaagttccaggattaaagctgtggaccaccactgctgactcattcaaggtcttgtttgtgatctttttttttttatgaacatgctgctgagaatttatcaattttaacacttattttatgcatatggatgttttgattacatctgtacaccatgtgtgtgcctggtaccatcaagagaccaaaagagagaacatccaatcccttcagctggagttacatctgtgaggttccatgcgggtgctggaaggtatccagatcctctggaagaggggccagtgccctgaactgctgaaccgtctctccagaatacccccaaagagacttttttcacgaggtcaacatccttagcccttaaggaaatccattctggtgctcactttaaccccagcaagtaggcagatctctgtgtctgtgagtttcaggcccaggggctacatagtagaaaacctgtctttaaataaaatttattgtaacaggaaaaataaaagacccagaaactgatattggggttcaaactccaagctgaaggagagaaaagcaaagcagctggcactagctttcacctcaagttcaggctgaaggggctggtccacatatgagctcttcaccaagcctcaaactctacctctccccattgtggccagagaatcctgagacttcaatgtcttcctatcctctttgatactgagccttcctgtcttcagtgtgactggagaatcaatgactgataccgactagtgaagaccctgcttatatcttttataaccctctagccctgggtttaaagacatatgatctgttactcttttagactgattcaaccttgtgtccctgggtggtcttgaactctgagagatccatctacctctaatcctgacttgtacaactaaaggtgtgtaccaccacctcctagcttctggctgttgggattaagtgtatgcctggtttctatggcttgaggctgactttgcttcctgaatccttaggcaagctttaataaatcataaataatatatcatgacaatttattagtcaggtttctctagagaatagaagtgatggaatgaatgtatatgtatagattcatatatgtaggtgggatttattagttgtgttctgagtagctcaacaatggctgtcttcttacagaaagataaaggacctgctagttgttcattccaggagactggatgtctcagctgtcacaatttgctgctaaggtcaagaagtcccagagagctgctgggtttagtcttccttggaatcctgaagtagtagttctaataccactgaagaaataccttaggaatggaatagatgggaaaagtgaaagcttccttcttccaggtccttttatgtgcactgctatcaggagatgtggcccagattcaggatggatcctctacctcaaataatccaaccaagacaagatcctgacagatgtgcccagctacttgggttttagttaattccagatgtagataatggtgatgactagccatcagatgtgaagagtgatcaaaggacacacctgatgttggcccctagactccccatgcatgtggacaatatccatgtgcacacagccagaaatataccataccttctctcacacaaaccagtcagtaaataaataaatacaaaataaagaaaaaggaaaaaaattatttaacctagctggacctaaaagttcacactttaaacccagcacttaggaagcagagagaggccaatacctgtgaattcaaaaccagcttgatctacacagcaagttctaacccatccaggactacatagtgagtccctctctcaaaaaaacaaaagaaaacaaaaaaatgatttaaccttacaagatgttctagtttatcccttactggggatctaacccacagcctcaggaaacctatacaataaacaaagcaaaggcttgtttttttaaggacattgttccctaggggcaggaaacatgctttgagacagattactaagagacaaatacataaagcatcataggaaaattaaagctataggaatgtgaactctgaaaaaatcagagacttacccttgtgcatgtggtaggagggcaaaaactcagataaaggagtgtttccaaatagccaagtgggctgtcattcacctggctccgcttcccaagtactggaattacaggcgtgtatagtcacagaaggcttactttctctctctctctctctctctctctctctctctctctctctctctctctctctctctcactctattgtttttcaagacagggtttctctatgtagctttggctgtcttggaactcactctgtaagccaggctgacctcaaactcacaaggatctgcctgccgctgcctcctgagtgctgggattaaaaaatatgctccaccacaggcctgcatcttctttattttttgaaattattttacttttttaatcattgcgctaaagaggcagacgttgttggatctctatgagttcaaggctggtctatatagcaaactcgaggctagccaatgtgatacagtgaggcccagtttaaggagaaaaactattctatttatatgaatattttacctgcatgcatgtctgtgtactaagtgtgtgctgggtgccctcagaggcctggggagatcattagatcccttggaactgggagttacaaatggtcataagacatgtgagtgctaagagcccgcaaatcatcaggcccattaccagtgctcttaaccactgagccaattgtgcaatcccaggtaaatacaaaatagaatctttttttgaagtttttttaaaaaagattttgtttattaattatatatacagtcttctgtctttgtactaccagagggtaccatatctcattcaaggtggttgtgagccaccatgtggttgctgggaattgaactcagggcctctggaagagcagtcagtgctcttaaccactgagccatctctctagtccaacaatctttaaaaaaagaaaagttactggaaggtggtggctgacacctttaatcccagcacttgggaggcagaagcaggtggatctctgtgagatcgaggccagcctggtctacacagcaagttccaggacatgctctagctacatgctcctgtcttggaaaaaaaaaaagaaaagaaaaaagaaaaagaaaagttagctgggcagtattggcacagcacttggaaggcagaggtagttggttctgtaggaagaggccagcctgatctacagagctagttccaagatagccagggctacaccaagcaaccctatcttgaaaaaacaaagtaaataagtaaggaagaaaaatcaaaaaagaaagaaagaaaagttagaaagctgggtgtggtgacctatgccattaatcctatgcaattagtaggcagaggcaggtatagtttgggaccagtctggtctatatagtgagtttcaagacaactagagctgtataatagatcctatctaaaaaaaaaaaaaatgggggtggggggtgaagagatatgtgcaggcaaaacatccaaacacataaatatgaaaagaaagaaactttaagaatgaccatcatagccaggtggtggtggtggcacagcctttaatcccagcactcaggaggcagaggcaggtgagtctctgtgagtttgaggccagcctggcctacagagggagttctagaacagccaggggtgtacagagaaaccctgtcccaaaaaaacaaacaactaaaaagaatgattatcattagtggaattgtttgttgcagcattgttaaacatctgaaataaagtaaatggcccttctttgcttccttttctttctgtatatttgtttgttctgagacttggtctcttttacataggcctggctatcctgaaactcaccatgtagaccaggctggccctgaactttcagagactcacctgcctctgcctctgccttctgagtgctgagattaaagatgcatgctactacactcagctttaaaccttttttaaaaatatttattttaaaaataatttatttaactttatgtgtattggtgtcagatcctctggaactggagttataaaatgcaatgtgggtgttgggaattgaaccctggtcctctggaagagcagccagtactcttaaccactgagccatctctccagaccctaatacttactttttaaaaaatatacttaatttgtattttatacatttggttagttggtttgtttattctattgtttcatgtgttttctttttatgtgtatggccgtttagcctgcatgtatgtctgtacatcacagacatgcctgatatcttcatagggcaaaacaggacattagatttccaggggctggaattaccgacagtttcgaatcttcgaacccaggtcctctggaagagcagccagtgctttcaacctctgaaccatctctctaggcccatggtttcttatatttttatttatttatttatttatttttgagacaatcaggcctggaactcactatgtagaccagtctggctttgaacagagctctacttgcctgtccccctagtgctgggattagagagacctgtaacaaaaacagatggatctatgtgagttggaggccagcctggtctacagaatgagtgccagaacagactccaaagctacacagagaaatcctgtcttgaaaaaacaaaaacaaaaaattgtatatagagagagacctgtaacactgcactctgccttagggggcatacatagtttgtgctcttgaagtagtctgcgtagacttactctttttagtgactaggccaaaaatgtttttttcttccttgtgctcccctacttagaatattgccaaatgctggaaatataatgactgcacttagttttcctcatcctcacttagggattagttaaggcctgaagaactcagaaactatccatcaaagtcagtctggaaggacctcagggtggggccaaaactcaggttgcctggggccaggccttgtggagttgaggctctgggagctctagtctttgtggttctagcttcctgagttctcatgcggtctgacagcagagctcccttctgggtatgttgttgggtgttgggctgatatgatgagtatgtatgtatgtatgtatgtatgtatgtatgtaggtatgtatttgagacagggtttctctgtattactttggaggttgtcctggaactcactttgtagatcaggctggcctgactgccttctgcgtgctaggaattaagtatgtgacttaccctttgtagagttatcttagatatgctatctcaaaatcaagtaggaaaacaaaagatcatctggggctagagagagagatcgtttagtagttaggaacatttgttactcttccacagggtctcagttcaattctgaggatctacatgggactaatagccactggtgaccacagctccaggcaatgtgatgccctcttctggtctccactggtacagcatgcacacggggcacaaatatacatgtgggtgagacaccaatatattaaatcaaaataaatattttttacaattttaagaagaatttgcaatttgtttttctcctattattagttgggcaaggataatgattattagtatatgaatgtgtgattgctggtgccagggcctgtaagcggagtttctcccaaataaccattcagagacttattattaattataaatgctcagtcaatagctcagactggttactagattgcttttacattttaaattagccttcttttcttctttgtttctttctttcttttttttggtttttagagatagaatttctctgtgtaactgtcctggctgtccttgaacttgctttgtagacaaggctggcctcaaactcagagtctctgcctcccaatgctgggattaaaggcgtgtgacaccactgccgggtccctaatatattttttaaaaatgccttggtttataactttctttgttctgttgctatgaaacaccatgaaactacttccatgaagtagttaatttaaatctgtgttttgcccagggcataatcactcacactttggttccaaaaattctctcttacttcctttgacttgagagctgtttttgtgtggacaatctcagtactccaggggcaagatatgtgaattactgtgagttcaaggttaaccttttctatgtactgagttccagattagccagggatacacactgagactgtttttaaacaaacatgaaaggaaaatagaacgacacacagtgtgggtagataagcaaaggcacaggacacagaagggtaattgataggttcagtagcatagagaagtgatgtgattagacttataatttatgaagcacaagtttgggccgggagttggtggcacacacctttaatcccagcactcgggaggcagaggcaggcggatcgctgtgagttcgaggccagcctggtctccagagtaagtgccaggacaggctccaaagctacacagatcaaccctgtctcgaaaaatcaaaaaataaataaataaataaataaataaaaaataaaaaaataaataaataaataaaaaataaaaaaataaaaagaagcacaagtttggttgcttccagtgtcaagtcatgactgcccctggaaacagcaattttaacacttctggttggcacttgctgagtccccctgtgaaaacctctcttttgttgtggctgcatctttgaccttggtccctagagacaaaatacagcccccccccccccccccccccccccccccccccccccacacacactccttgggatgagagcaaagacagaggtaagaaggcgcagtcgaggacttggaagaggcggagcacagagggcagactggatgtgtgagaatgagaaagcctggtgacaatcgagcttgcagacttagctcttcttctggagaggggaactaggcgtttgaaaagccctcgcgcgtgaaggacggattgcaagaggaaagtaacgagctgtaaagaccacggtcttcgtggagaccagtgacagaaggctggaggaaagtgggtgacttccagaggcattaagttaggaggcgaattaggacggcagatgggcagcatcccggccccggtttctagtgacctcagcggtcacgggtgagtgcggactcggtgttcccgcgtcagggaggtgggcgtggcctgctcgcgctgtcgtcccggtgaccggacggggcggggcccggggcggggccgcccggccgctgcgtcactcgatggtggcgatggtgcgtgtgtgtagggggcgggggatacgctgggcgcgtccccggggtcacgtggtgcgcagcgcgcacagtccttctgtcggttggtcctggagcnnnnnnnnnnnnnnnnnnnnnnnnnnnnnnnnnnnnnnnnnnnnnnnnnnnnnnnnnnnnnnnnnnnnnnnnnnnnnnnnnnnnnnnnnnnggttgcccgcgggagtgacggccaccgcggccaatcagcgcggcccgagggggctgggctgcgaggtgcgggcccggggcgcggaacagggcagtgggggtggggaggggtgctggagctgcaccccctgcttggcctgtgagattagggcgcagcctacactgctgcctctgtcgcgggaacacgttttcgtgcagtgcctttcttatcctgctctgggaagcacaccctttcctcaagaccctgtatatgggagtgtcctttctctatagttttgaaaatctgggcgtcgctccccttccttaaactctagtcctgggattttctcagtttctagccatccctaagaacggactgaaggcattctcgcttctctttgctcctcaatactgagggaacactcccatattcaaacgtaattaacagttctcctttttcagtttggggttcagtctgctgataggtccttgagaagtcaggtctgtaaccaaagttttgcagtactttattatatcccacaactctgaggaaaggaatccttcttttcaggccccaaatctggcatgcttcagtagtgaatttgagggccagtttttgtttttgttttgttttgttgttttgttttgtactttggtctacggtgagcatctcttttcgggttctagtccaatcctgatgcttatggctcatagtttccagtttcatctataagaggattcgctgacttgtccttaagtctgtccttggggttgtatttttttcttgtgttcgccaagcttacttgtttctgggggagactggttttcctatctgagagtgtgtttgctttctgggtctctttagggtttgagatgcacctcttttaggaggacacataccaccgtggggggtgcagcagggctgggcacacctttctcttgaatcctcccattcctagatggggtagttcttgagcacccctcacccaccggttttccaccttgtcctgttttctaattgaaaaaattatttatttatttggtgtgtgccataacatgtatgtggcaataacaggacaacttgaaggatgttatctctctgcttccacttcgtgggttctaggaatgaaactcaggtggtcacttgtggctgcaagtgttgagccatccagctagccagtcctcctgttttgagaccaggtcttgctgtgtagctctccaggaaatagtgtgaagtcccagctggctttaaattcatgatcctcctgccttggcaccggagctgagattacaggtgctctttcctatcccctttcttcttaagcttttctgccatgcaagatagtttcactcttgggtttccttccccctttagaaccacattccccttcatgtgctctcccaggctctgtagtgtgtctctttggtcttccttcctctgttgaatgtgtatctgcagaacactttctgtattgatgccctcctcccacagggcagttcttttagtcaccctgcccgagcctttctttcttgacagaatccccttccacacccatgagactttcattgttcattgtgaggccctgtctcacgaagtagttcaggttatcctggaacttactgggttgtctaagttggctttgaacccatgatccccctgcctcagcctcacaagtgctggggattaccggccagaactccggtggcgtctgagttgtgtggtgcactcctttagtcccaatgcaagcaggagatctctgagttggaggccagcctgatctgcagagctagttccaggacattcagggctacacgaaaccctgtcttgaaaagccccccaaaagaactaccatgcttggctcacatttatatatatgtagtttatctttctgcaaataggaattctcttttggttcactgtttgtccaggcatttttctggtttctggttcctgttggacactgttctgcttatctggtgatgataatgtttctcctttctcttcctctgtgttggagatggccgtaagaccagggctgcttgacctgttgctacagtcaaaatataaagaaatccccttgtaatttttgattattcttagaactcttagtcctccgatgctttacttcctgtaagtttctggtgaagctcttaatagtttttgtggatttgatcccagcaatcatggctggaggattgttgcaaatttgagggctgcctggtccatatgatgagctccaggctagctagggacttatagcaagagcctatctgaaaccaacagatctgattaggtaggctctattcctttacttccctttccctcaagccgtgcacacacacacgcacgcacgcacgcacgcacgcacgcacgcacgcacacacacactgtcttctttttccctcaagacagggtttctctgtgtaggcttgtctatcttggagctcactctgtaggctagtctgacctcaaactcatagagattgcctgaggcctgggatcaaaggtgtgcaccaccactgcccagcctcttttttaaacttccctgttctgggttggggcttcaagagatttttctactaatgtatgccttctagcccataaactaccttccattagttctctgtatcaagcaaaaaagtcatatgggctcagtgtggattatttgcctgccatgtgtggagggtcttgatttgattcttagcatgaaaaactgtggcagcttgatttggtggcagacacctttaatctcagtacttagggggcagaggcaggcagatctctgtgagtttgaagccagcctgctctacgtagtgagttctagaacagccagggctatttagagactgccttaaaaataaatgaatgaaaagaaagaaagaaaaaaaaactgtatgtctttctctccttcatcttgaatatctgaatatctgtctgtcttttctcccaacccccatttttaaaaaaatcttcaaacacctgggacatcttgtcttaatagatcctcactgctaatatttctctttccctctccagagttttgcatagggcttttcagtcttgaacccctgattcatttctccacagctggagtttcaaatgctgaggggataatgactcctctgacctttcttccttttgggaagtacttgaatgtgcagctgaaggaggcatgaggcagggggaagggagtttggctatgagaagctataccagtaggacagggcaggaatatagcatttcatgacccaagtactgaatctcatttggaaactggacatttgccaggcacctgcttcctagggatgctggaggatttaatggtaccctgggaacctgtaggaattaatggggttttcggggaggtgccccaactcagtgtgagaacgtgaataaaattgaccatcattatgttttggaacagataagctgcctcagatttttttgttcactaaagtactagaactaagttgtgttatttcaagaagggaaataaatcccttgttcagtaccacatttatttatttatttagatttttggaggcagggtttctctgtgtaacagccctagctgtcctggaactagctctatagaccaggctggcctcggactcacctgcttctgcctcccaggtgctgggattaaaggcttgggccaccactgcctagcacatactacatttctttaaaaaaaaaaaaaagaaaaggtggggtggggtggggtggggaggtctgtttgattagtacctaataaaatatgatctgctgaagtgaacaggtagtttgtctctttatttggctcttgctgctctatctgtgtagtgctgtaagcactcccttgaagggccctacattcctgctcctcatcctgaatgtgacttctaatgacctgcttgtcttgggtctgtatatattccactctagtttttgggtggtgtaaagatagggaactacacattgagtagccagattcccatatacagctgaagagcgaatcctcagtgaaaacaaaactgattgttaacaaatgctggggtattgttctccattttctctttgtccagacacacaggtcaaagcttgtacaatgtaccggatttcttttttctttctttttggtttttcaagacaaggtttctctgtgtagcattgaccatcctggaactcattttgtagaacgggctggctttgaactcacagagatccatctgcctctctgcttctggagtgctgggattaagggagtgtgccaccactactggcccaatttctttttttttttttccctccctatttttagcaaaaagaaaaaaaatcattttatgtgtttgcctgcatgtatatgtctgcactatgtgcgtgcatgcctagtgcccacagaggtcaaaagagggagttggatcccctggaactggttatagtcagttgtgagttgctttgtgactgccagaaattaactggggtcctctgaaagagcagcagtactcttcttttttttttttaaaggaggtcaagtgttttatttattttttagagatttatttatttttatttatttatttattatgatttattatgtgtacagtgttctgtctgtatgtcgcctgcaggccaggggagggcaccagatctcattacagatggttgtgagctaccacgggttgctgggaattgaactcaggacctttggaagaacaagcagtgagtgttcttaaccactgagccatctctccagcccgcagccagtactcttaacctgtgagccatctatccagtccagaacccctcccccgactttttgagatagtttgctgtttgtagctccaggctgtcttcctcgtcgtcgtcttttttttttttttttttttttggttttttggttttttgagacagggtttctctgtggctttggaggctgtcctggaactaactcttgtaagccaggctggtctcgaactcccagagatccacctgcctttgcctcccgagtgctgggattaaaggcgtgggctaccaacgtccggtcgttttttattttgtttttttttagatttttttaataatgtatacaacattctgcttccatgtatatctgcacaccagaagagggcaccagatctcataacagatggttgtgagccaccctgtggttgctgggaattgaactcaggacctctggaagagcagtcagtgctcttaacttctgagccatctctccagccccaaggctgtcttcttacctcatagtctggtactgtagatagttgccactgtttctagctaacctttagcttttttaagctgtctgtaaaatttactggtttctctgtatattgccagatttaagtgcttaaatatatgttgcttaaaggtgtgttttgcctggtgttggtggtgcacgccttttatcccagcacttaggaggtagaggcaggcagatctctgagttcgagggcagcctggtctacagagtgagtgcctggataggctcgaaaccctgtctctcgaaaaatgaaaaaagaaaaagaaagaaaaaaagggaaaaaaaggtgaacttttttttttttgccttgggtatgggtttgaaccagggtgttgtacatttaagacaggtgctcttctgctgagctcctgtaccccaaggtctgatgggtaatttttgacatgaaataattctagtaagtattgagtagccagcttgtttctgactcctctcttgttactgtgagaagggaatcaggataccccacatcaagccactggagtttctagagttagttctctttggttttctggctcttcagatggacatgagaaggtccagattgcagctaggtgcttggccttggatggaagctgtcggacatctgtaaatgctctagaagatagtcctggggagctggtggcatttttgatgagcttttagtttgtgatactctctccttgtgttatagggggtatttctttcctttatattttttaaagctaggttctcttatatagcctagactggctttgaactcctcctgctcaaactcccaagtgttggaattctaggcatctgctacttatgcccagctctcactgggcttttccactctgaatctcttaaatcattcattcctgtttgcctgttagctttcatggccctttcccaatgtgatcctactccaggtcttgatcatgaggaacctgaatgttttgtgtccctgatcttcccctaaaccctccattcctcacacaaatggcagattattgtcagtgacagatttgatctggatctggcactggtcccagctcttatgggcacatgtaacctcaggcaaatcactttgtgctcttatggctaggcctcattctccccagctgaatactgagcagttgactatttcaaggtccacccctcacagattctgcagggaccttgtttagaaacccagttgcctgcaggagcgcctagtagctggtctgatttccttcacgtgcttcagctggcagactgccaatggttttcttgtcccaagtcacttttgctggcactgtctcctttctagccaaacagccagcttgtcttcacgcccaatgtcaacattcttctgcctctgtgttctcttgtcagttgtgggctgtatttcattcagaactacttcaggttctcaaagaagtctgacttgagttttccattcaatattagctgcttgtctgcatcactaagagagcagctgtttgttttttaggctgtatttcaaatataatcatttacttgttaatgcttttattttttaaaatgatttattttgattttttagtgttttacctgcatgtatatctgtatgaagttgtttttgtttttgttttttgtttttcaagacagggtttctctgtgtagctttggagtctatcctggcactcgctctggagaccaggctggcctcgaactcacagcaatccgcctgcctctctctcccgagtgctgggattaaaggtgcagcctgtatgtagttgtttaatctcctggaactggaattacagacagttgttagctgctatgtagttgctgcgaatttaacctgggtcctctggaagagcagccaatttgtgtgtgtatgtgaaaagtatgtgtgtgtatgtgtgcatttttggaagccaaagttcttcaatcacttagacattttatattcattcatttatttagagacaagattttactatgtaaatcagacctcaaactcacagagatcctacttcatcttgcctggtacacccctcatgccactgcggactccaccccccacccccccgcaaaaaaattcattcattcattcatttatttatttatttttggtttttagagacagtgtttctctgtgtagctttggatcctgtcctggaagttgctctgtagcctagactggcctcaaactcagagatccgacttcctttgcctaccaagtgctgggattaaaggcctgtgccaccactgccctgcttaaaaaattttttttgagactgggtcttaccacatagatctggctgtcctggaattcacagagatccacctgcttctgcctcccgagtgctgggattaaaaacaaatttatttactttagatttttttcttttacccacctcatttatttgttatttttcaatcttaattaaaagcctttttttgtgtgtgtttttgccttaatgaatgtatacttcgtgaatgcagtgtcctctgaggccagaagagggtgtgggattcccttggaactagagttacagagagttgggagctgcctcgtgggtgctggggattgaacccaggttctctggaagagcagtgctcctaatcactgagccatttctccagccccatccctgttggttcttgactaacaatgaggtaacctaatagctttgttggattcttgcctaggtctctccagttggaccttggttatttggccaaatggaactaatgggctttcagaaatcttgcaaaaatttagagagtctggtattagtcacccagtgtaaataggatggttgtgggaaagagaggtggtgctggagtcagtggtctttggaaaaggactcagaggtgttgtttggggaagggtttaaaatggggcctttattccatgaaggaacataatcctaggaattcaggccaactcctaggtgtgtgtcctaggggagtgcatttgaatgttttttttctagtaggaacctgtgattttagaggtctctcccaaatgaaaaagatctaatctttaattccattacacctttaatactagcactcagaggcaggagcatctctgaatttgaggccagtctggtctacacagggagttccaggccaggtgagactgcatagtgagaccctgcctttttgttttgttttgttttgagacagtgtttctgtgtggctttggaggctgtcctggaattaggtcttgtagacgaggctggtcttgaactcacagatatctgcctgcttctgcctcccgagtgctaggattaaaggcgccagcacgcctggcgaccctgtcttaaaaagagagtgggtgtgggtgtctacagctgggtggattgatttacctttctggcttctgttggtgcacagatgattgaaataccaaggttgtggaagtctgtcatagaaatgtgggtacttaaatcctgctgcctctaccaggagcaagggttgcaggatgctaccatgcctgactcttcattttcaaaaaaggaaacatagcagttccttatcgttagtatcctaaagatctttttgttgttgtttgttttttgagacagggtttctctgtgtaacagcctggctttcctggaactcgatcagtaaaccaggctggcctagaactcatagagatccacctgcctctgcctggctcattttatttttttaaataacacacaattctatttgcatgtatgtgggaccatacactataacatgagcacacactcaaagaaaagtaactgtccctcttccagtagccatcaattgccacagctcctcagctaagtggaagactggcttgatcttatgcagctctactgtaggtaaccatagctgctgtggctttatgtgtgcaacagctatgtcctatccaaaggacagcagttcccagcagccctccccagcctctggctcttattctttccaccccctcttccaagatgttccttgggggatggggattactatagattctcagcacgttgtcagttttgagtccctgaattaaccactgctcactgtaaaaagaagcttgtctgtgcaggttgagaatagcacaaatctgtgagtataaacctaaacatctaggaggtgcttgaccatatatctgaccatttagcaaagcaatagtagctcccccagggcctttaagcacttgagccagggttttttgacccggtttccaatatcaaaaggcctttttaaagaaagctatatagtggcatgaagtcctacttctcagatttcagcttttctgcttagccaggtgccatatggccttttcctaccttgtaggttgtgggtcattgctgcctgtttctctgcattgttggaaatgggatttttgtcaaggatttggtatgtggcaaaaactgaacagatgttatctaattcctggaattaatagttaaggaaggcctgggataaaagttaatatttaaagcgtaagagaattagttgtcactaattgtggtggtggtgcacacattaagtcccaggcagatgtaggcagatctgtgagtttgagcccagcctggtctacagagctagttccaggacagacaggaatacacagagaaactctatcttgaaaaaacaaatagttgaatattaaataatgtgtttttaacattctataagcaacaaaagggatgcttttttcaaggaaaaacttagtttagctgtgttttcctatgactttcagaaagaacacacatgtacccaggtaatggtggttcatgcccatgatcccaatacttaggaggaggctaaggcagaaggattacttcaggagctaacctggactacagagtaaatttttatttcaaaaaaaggaaatagggggagaaaagaaaaaagaatctacacaaaactcactacaagcctggccaaaggcaggtagatttctgtgagttcaaaaccagcctggtctatatagcaagttccaggctagccagggccacatagtgatccctgtctagaaataaaccaaaaagacaaaaaccaaccaaccaaccaaacaaacaaacaaaaaaccctgaaaaatagaacagcaactccccccccccaaaaaaaacccaaaacaaaacccaaaaccaagcctcacttgagacctctactcttcagtctctagacaatggaggtacttacaggctgaggtccccagggcctgtgaaaagtagttaaaaattttgtcagacccttggagaaaataatagcctgtcttcaggtgctattttttccttaggttttgccacctccctgtgtttccaaagagtactatttttttttttaaagattttatttatttattatgtatacaacattctgcttctgtgtatatttgcacaccagaagagggcaccagatctcataacggatggttgtgagccaccatgtggttgctgggaattgaactcaggacctctagacagcagacagtgctcttaacctctgagccatctctccagctcgagtattattaataattaatagttcatatgtttttgtatgcagagcattttttatttttgtttttttattttatttttttgcttttcagggttttagcacaatgatgtcctttaatcctgcataggatggtactgacattcttccactttcctagtgaggaagctgaggttaccacctaacaagtgtatgtcacataaggtcactgcctgttagactggggtgcccatcaagagctccttagcttctagaagagttcagctgcaacagtgtctcagtcaactgtcatgagaagaggatacagaactgatgtcctgttgagaggtactgatggctgtgcccaggcctaatggatgagggcggggcttttctgcaaaggttctacaagcagtctggattggtagggctaagggctgcaagattagtagccttgacagtttattgtgagccaagctcttggacaccctgtgaaggtaagcactagctgctgatcctcaatgttataggggaggagcctcagtctccgcacgaaatgacttgttcaacattttgtgatcccagcctaggccaccctgatgcagagtcctggcttagattccctgcttccctcctttccagctcccgtctttagagacccccatttggcttggcagtacagttgttacctggaatcagaccacctgttttccagatactgtccttgtgtgctcaaagctgtcctcacacagaatctcctgcttccccctctcaggttcttaagtgcaaggattataggtgtataccaccatgccctccctgcttgtgtgtttgtggggcatgtatacatgtttgtgtgtgggtttatatataatcacttccctcaggcggtagaggcagcaggaaggtccaggtccaaggtcatcctcagctacatgagatcccatctaaaaaagaaaaagaaaaaattaccaaaataggggtggatccttaattgggtaccctttggcaaaggagaaacctttaagtagggcctgcagaatggtgaccaaccagaaatgaaataatactggatgtgtaatcttgcccacttgaaaagctgaggcaggagtttggctatagaataagaccatgtcgaaaaaaagaaagaaaaacacaagaagaaaggtgttcagggcattgcttgtgtcaggctggaggccttccttccacagtggtggacagggaggaggagtgattgtgagggtaagatgttcctttagtgaggctgaggaataggccagaagtcatagagaaaaagtattccagggaaaaacctgggcattaggctctcccactgactgtggaaagttccactgattcagccagctcattctcagtaataggaaggagtaaactcaacccatttagttatggaagataagcttggggcctcagagaatgcagttttgaatatggctttgaaaacagtgtttcactgtataactcaggttacctcaaacttggggcagccctctttgtatcagagtgtctccttattttatttatctgtgtgtgtgtgtgtgtgtgtgtgtgtgtgtgtgtgtgtgtgtgtgtgtgtgtgcgtgtgtgtgtgggtgtggggcggaggaggtgggttggtggtgtggcgtgtgctgtggcacctgtggcgatcaaagaacatctttttttttctttgcttttttccaagatagggtttctcttgaactcacagagatccacctgcctctgtttcccaagttctgggactaaaggcatgggtcatcatctggccagatgacaacttttatagtgtcagttttctccttccatcttttattttattttttattttttgagacagggtttctctgtagctttggagactgtcctggaactagctcttgtaaccaggctggtttcaaactcacagaaacccgtctgcctctgcctcctgagtgctgggacaaaaggcgtgtgacaccaacgcccgacaagaaagatacttatataaaagaaagtcttttgttttaatttatttatttcttatgtacaataatctgcttccatgtatatctgcacaccagaagagggcaccagatctcataacggatggttgtgaaccaccatgtggttgcnnnnnnnnnnnnnnnnnnnnnnnnnnnnnnnnnnnnnnnnnnnnnnnnnnnnnnnnnnnnnnnnnnnnnnnnnnnnnnnnnnnnnnnnnnnnnnnnnnnnnnnnnnnnnnnnnnnnnnnnnnnnnnnnngagagagagagagagagagagagagagagagagagagagagagagagatggggagatgacttagatgaatgagcagttaagagcactggcccttcttctggaggacctggattagattctgacttagatgactgagcagttaagagcactggcccttcttctggaggacctggattagattcccagcacccatatggaggttcacaaccatctctaactgcagttcctggggacccaactcttcttctgcaggcaccagacacgcatgtggtgcacagacaatcatgtaggcaaaatgtccatacacataaaacaaaaaacaaccttcataaaaccaaaccaaactgtccctcccctcctagtcttcatctctctatcctgtcagtctaatagacttgtagtgtgagctaggagaaggccctgcttgaaacacttgatgttgggataaactacggatttatttatttgtagcacagatgtgcctcagatttactgggttgtgcgggatgatctcagatatctgtgtccacctgttgggcttgcttcatggagtctggcatttattttatctcgttaaggttctgggaattgcactcacagctcctgcatgctaaagcacacatcctgtgccgtgtcccccagtcctgtgatagacattttaaaggaccttagagacttttctggtctgatcctcacagatcccaagatagaggccaataggctgtatgatagataacaggaagaaaggcctgaggaggtagctggtaaacagaactggagtggtaattaggggtctgtggacagtggtgcccacttccagcacttgggaggcagaggtaagcagtttacaaagtgagttccaggccagccagggctgcccaataagaccccacctaagaaaaaaactaaacaactctgggatgagcctcttgctatagagtgtcctagaatgttctgaatttgccttctctgtgtgtgggagcttcccaccacttgcctctgactcccacatggctactgtggcacatgggcccacacatacacatgcacatgaaataaatgaaagtgtaataaaaattttaaatggaaaaatactctcttgttcctaaatgtgagcattatttctaaatttctccagaactgggtgtaggaggctcttggtttcttgtcacagatgaatcttttgtattctgggttgtggtcttctggtggaagtgtcagagtctgggattccaagcgtcttcacagcatgctctgccttctaccttgaggtttgaaagatgaccgctgctagagtcccagctatgttccactttcccctccacaggggccgcattagcttggtcctttctgaaaacttaagtatttctgcttgttgtaaaaggtgtggtaatgctagcacagcctttgaaaggcttcagtggctttatcttcctttattcaaaatttgcctctatctaaaggcgtgaatacaaacaagcacagccatgtctgcttcttttgataacagggatttctcatgcttggatattttgttgttacattcatgttgatttttatttctggttatgtgtgtcccatgtgtgtagatacccacagaagccagaaggcattagatttcctgaggctggaggctgttgtgagctgtccggtgtaggtgctgggaactgaactcagatcctctggaggagtaacgggtgcccttcgttgctgagactcctctccatctctgccttgtatctttataaccttatgtaatctgggaatgcctgatgcttcagcttttctgcacttatatcttctcagtatcatgggaacaagaaatttagtcttaattgtattacctggttttgaaggtccagtaacacagtataagtataatattctttaaaattttatatacctatgtgaaggtcagggggaaagcttgtgggagctttctaccgtatgagttttagggattgaactcaggtcttcaggcttactggcaagtttacctagagagacatgtttccagtccacaaatgaattcttgcaattaaaaatttgtgcagcaacaacacaaaacaaaaaaaatttttgtatgatatcctagtcatgatggctcatgcctgtaatctcagcacttgagagactgaggcagaaagattgctgtgagtttgagaccagattgtctatatagacatagtgagttccagaccagtttgggctacagggagaccctgtccctgaaaatataaaattgttttgatttgcatttcctttaacttagggtgcttatgtggacatggacctttgtgtctccccttgtcagtcagtataatctgacagctcttgcattttgcccatttttggcatgcctttttacctttgtccttagttatagcactccttgttaataaaggaagttgcctctttgtcctaatgagctatagttatttgtccctttgaactgtgctccaccatgtgtattaaagctctcattactgttgactcagggcattgacagagcactgtgtctaagtaaacacattgggcttccggtctcctttgggccagtggattcctgtttagagtttgaatgttaggagtattttgaagttctgccagtcttgagagtagaatcctatagatctcatcaggcttttttattttttggtttttcaagacagggtttctgaatagctatggagctagtcctggaactctctctgtagaccaggtttgtcttgaactcacagatctgtctgtctttgtcctctgagtgctgggattaaaggcaagtgccaccaccactgggcagaaattgtttacatttaatcctttttgtgtgttttctgtgtttgtgtatatttaagtgtgaacatcataggacgactctctggaatgtgttttctgctgtccatccgagtccactgagccatctcaccatctcatgtgagacttttgtaaagattaaaatttaatattgtttgagctgggacggtactctgtagccctagctgacctggaacttgatatgtagaccaggtgtgcctggaactcacagagatcccttggctctgcctccccagtgctggaattacaggtgtttaccaccatacctggcccttagcagttcaacaccatggagactattttcaggagccacaggaaataatttggtcatcttcactcatcagttcctgcttcatgcctatattatttgtttattttttctctgagacagggtttcacaatgtagtcttggttggcattaaactttcagtgatcctcctgcctctgcctttcatgctctttgattccacgcatgtgttaccacatcaggcttgattgattgcttacactctgcagtgcgaattgaatacaggaccttgtgcttgctgggcaaattcttttctgcggagccgactccccagcactatagagttcatttagtcaagtctggcctggaattggagcttgaaatgtagccgaggataaccttgaactcttttattgtacttactctttttgaaacagaataagtcagtttctgtgtaactctggctagtttgaaatttgcagatagcagatatcagcctgcctctgtctctgcctctggagtgctgggattgaagttcagttctactggactcatgatagaccaggctggcctcatattctttgtgtttcttctgttttagcttcttgagaactggaattgtaggtgtgtgtcataatgcttggccttccttttgtttttaaaggattaatttttatgtgtgtatgtatgctggtgcccatggaagccgggcattgggatctcttggatctggggatacaggtggttgtgatctgtttgatgttgggtactgaacttttggtactctggaaaaaaaagtaagaggccttaatcaggcctccttccttttatagttatttagtttttttttttttttttttttttttcttttttttctttttttcttttttcaaggcagggtttctctgtgtaacagccccacaaaactcactctgtagactaggccagcttcaaactctaagaggttggcctgcctctgcttctcaagtgcctggctttacttaagtggtttttgagatagggttctctgtatagacctgtctgttctagaactcactatgtgattataagtgctcagccaatagatcaggcttgtttctctctaactcttacattttcaattaacctgtatttttaatctatgctttgccatgtggcttggtaccttttctcagtacagcatgtctctcttgtctttgcatgtgctggcaactccagactccaccttccttcttcccagaattctcctagtctggctcccctgcccaatctcttcctggacagctattggacagtcattttctttattaaatgattcatagcaacatgtattcacacagtgtaaaggaatattcaacagtatactaccatgctgagctttatttatttacttattttgagactgcattatttatatttatttgggtctcactgtgtagtaatggctggcctggaacacacagggagagacctgcctgcctcttcttctggagtgttggattaaaggcacgcaccaccctgatttattccccccctcttccctttttttgtgtgtgctggatgggacttagggccttgtatttgctagccaagcgctctactacttgctgggtgcacatgcagctctagaactctgttttttccttgttctttttatggtaaggtctcatgtagctcaggctggctacaaactccctaggtaaaaggatgactatgtactttttttttttttaaagcagaaagaacagatagagtgtattttatgtgtattgatgttttgtctgaatgtatatctatgtaatattgtgtgtgcgctgcagaacccagaacagggcgttaggttctctgaaacccaagttatagaaggttgtgagctatcatgtgggtactggaattgaacccaggtcctctgaaagaacagctattggccttaaccactgagccatctctccagcctaggaacagatttataaaaaaaaataaataaataaaaaataaggaaacctcttgatgtgaaatgttgacaagggaggaataccaggcctagaacttctgatcctttgcctctacttgcttagattatagggagggccaccatgcctggctttgttcaatgctggggatccttgtgcgccctaggcaagtactctaccaactcagccctacaactttttgtctacttttccaaaagtagggttggaggacaacagtgtgtcttttgttgttgttcttgttttttgtttttcttgctttgttgttcagagttggcatcaactccctggggctcagggatcctctttcagcttctaagtcttggctgcatctcagctcatatctacgtcctttctagcactcaactttttatagcagttacagcttgaactgactcctgtttattggctacatattaatatgaaggctcctcgagggtaaggattgttcatctctttgggtcttgactaagtcatttctgaacaaatatttgttgaatgtgtcatcgaggttgagctacatcatgagaggagagcagttattttttggagctctgagggatgaacttcataggggagcccttggtaagccttgctgagaggggcctctgaaatttcagagatcacaggcacagtagaggagtgctgctggtggggacaccggataggaggggaggcaccagagagggtgctgacagggtcatggagcttggtgttttgaataatgcctgcttgtttttttatgtgtggtggtgatgctacacgctgggcagactttcccaagtttcataaatatttaattggctttttcaggagaataaaagcagccccgttgatgactgaaaatgacaaagcatccacctaacagacgaggaatcagctttgaagtgggagcccagttggaagctcgggaccgtttaaagaactggtacttttatatttttttctaattaaagcactttagggagggagtctcaccagcacctatagagtggtgctgctgtcctgttttccggcttcttggaagatgaagggaaacaagtttagaatataggcctgttttttctctttgggtcacatttgtttctccttttcctgtttgatggagttatgttaaagcggagcaggggttaccctgggaaggaaagcgttctcactcttggttgcctgtttgaaagaagagcagaagtgagatagagatgagtggatggatagacgcaacagcacccatgtcatcacaacctcccctgtttttctgggtgtggcgtaggacgctaagaattgttgaacaggataattagattgagaagctgaggggttgttttgactgcattgctgaattttgcttgttttatgtgaaaaggtttctggtaactatggccgaccttgaattgatagctgagcctccttaatgctgggattacgggtctctgcaactatggctggcttgtgttaattgctttttatcctctggctgtcagatactttgaatgttcatgtcatctataaatgtggtcactggtaatgttggcatctggagaggatattctaagagtcacatattgaatatctggagagcaatcttcaaaactaaacttacctgggtgtggtggtacacacctgtacttcagtagctgggaggctaaggtaggaaggttactgagaactggagcatagcctggcataatgagttcctccaggtcagcataaactacagagtgaaatcctgaccccaaaaatccaagctagccaacggaaattcaggttcagttggtagagtgtttgtctagcatgcacaaagccctgggtttgattcccagcactggataaatcagaggtggagaggtagaggcaggggtgtcagaggttcaaggttatcctacctgctgcatagtgaatttgaggccagctatggttatataagaccctgcctgaaaacaagaagaaaaagaaaaacagaacaactacaaagatagctgtagttgagggcatcctagattttggttatttcgtggtgctccaaaacagttagaagtttcagaaccacaaaccttttgagtttttctaaggaatagcctaaccctgtgatagttatctcagaatagattgagtgatttctgggatatagggaaaggaaaggggaatggcttgggtagaaaactgtgctattaggattaaagaccctggaactagagagtgagtttgataaaatacttgtctggtataggtgaggccctgggttcagtccctagcacctcagaaataaaagaaaatatggtttggttgtatttatactggttgtgaacagaattactgattctataattattttaatgttggtttcagctattttgtattttttgtgtggggggcagtacatgtctgtacatgttttcaagtgcatttgcctatttgcgcatgtatggtagtcattttcctgtgtatgcatgtggaaggaagcattaaatggactcttctatcactgcccatcttgttttttgagacagtcactcagagaacctgactgggcagggaggcaccatgatctgcctgtctctttcccttccccaagcaatgggccctgtacctagtgcttgggattcaaactcaggccctcatagttacatagcaagcactttacccctgaaccattttccagccttgtcagtcaaggggaagtggagattgaacctgtgactttgtgtatattagacaattgtttcttctattcccagcctgtatttctggtttagtttgctttccactcctctgataaacaccacaaccaaaaacaactcaggaaggaaaggctctcgtgtctggatcatagttcacccctgagggaagccaaggccggaacctggaatcaggaactgattgaagcagagatcacagaggaatgctcctagaggcttgctcagtttgttcccttatatactctgggaccatctgccaagggatggcatggcctaagtgggtgggctcttcccacatacattgttaatcaagaacatgcccttacatacttgcttacaggccagtctgactgaaggagacattttctcaggtggtgttcctcttcccagatattgacaaaaaattgaccagcataattttgttttttttgagacagccagtaaattttttaaatttattttttctttttattcctctgtgtgtgtgtgtgtgtgtgtgtgtgtgtgtgtatgtgtgtgtctctgtctgtctgtctgtctaagtttatgtctgtgcacatctgtgcattagtggaggtcagaggacaacttgtggaagattctcctttactgtagaatcagagaaacgcaggtcacaagggatgtagtaagtgcttttatgcattaaaccatcttgctgactgtggttttgacatttttgttcatttgtttgtttgagacagggttgccctagaactcagagatctatctttctctgtctccccagtactggaattaaaggtgttcactaccatttctggctttggtttggattttttttttaaagtgtgcattggtatttttcctgcatttatggctgtgtgagggtgttggatccctggaactggagttgtagacagttatgagctgccatgtgggtgctgggaactgaactcaggtcctctggaagaacggctagtccttttcaccactctctagcctgggttttgacatttattgaaggcctgcttttactgactaggatggtgtatacacctatatttctagcacttagggtaagacaggagtttaaagctaacctgcaatcttatctcaataaacagatagccccaaataaaaatgttactgttagtgttatagtcaaggaatcaagggaatactttttttttttgaaagggtctaactatacagaccagacttgttcttgaactcacagagatctgcctgcctctgcctcctgagtgctgggattactaccccggcaacattttttgttttaaaaatgaaaaaatattaggatacagataaagctaattataaaataatttacctgtcaatcagaatcagtaaatacatttttgtttaatttgcttaaaacattttagaataaaggtcttatcctcctgcttcatcagccttctgaattctgggatttgttactttaaaaaatatattaattttaaaaataagccgggcgttggtggtgcagggcttctctgtagctttggagcctatcctggcactcactctggagaccagactggtttcgaactcaaagagatctgcttgcctctgcctcccgaatgttgggattaaaggcgtgtgccaccaacgcccggcttatttttgaaattttaaaaatatttgtatatgaattcttttggctgcacgtctgcacgtatgtgtctggtgcccaaggaggtcagaggggggtgggatcccttggaactggatttacagagagttgtgagccaccatgtgggtgctgggaatccacgggtcctctggaagaacagccaatgctcttaactgctgagccagctcatttttatgtgtgtatgtgtatgtctaagtgtattgtgtagcacatgtgtggaggagcctttggagatcacaacaggtatgagaagtctgggcagtggtgggtaatcccagcactggggggggggggcagagaatgacagatctctatgagttcgaggacagctttgtctacatagcaagttggaggacaaccagaggtgttacacagagaaaccctgtttcaaaaaacagagaaactaccaccaacaaacagaagaggcactgtgtcccctagaacagttgtgagctgctgtgtggtgctgggacatgaacgtgggttttttcaagagaagtaggtgctcttaaccactgagcaatctctccagctcaggatttgtttaattttgagacatagtccaactggtagctcttggtggcctggaacttatatccttctgcctcaagactcccgagtcctatgattatatgtgtgtgtcagtatacctgcctgaactctctactttgctcctctttcccttattacatttatttatttatttttgggttttttttgagacagggtttctctgtattgttttagaggctgtcgtggaactctctgtagaacaggctggccttgaactcacagagatcctcctgcctctgcctcccaagtgctgggattaaagtcttgtgccaccaacacccggcaaatttttactttttaacatctgtgcaagatgcattctgacagtgctcactggctgggacatttcattgtttgcttagatcattgcttctgaacgccttggtatagatggaggtagttacgctgtgagtatcacagcagtgtttctgccaggttgagtgtgtatgttttaaataagttttagttgtttctttcctttctccctctgctacccaggctggcctaggctagtcactctcggactcatgtttcccatgtgctgggattacaggtgtgaaccataccttaacaacttactaattttgacacatagattcttctttggttttttttgaggccaggtttctctgtagctttgaagcctgtcctggaacttgttctgtagcccaggctggccttgaactcacagagtgctgggactaaagatgtgttccaccactgtctggctagacacatagattcttggcagcacttttactctttcttcccccaggaaaaatgtacatttaacacccagactactcacgagaccgaggtgagaggttggaagttcaatgccaccctaggctacagaggaatctcaaggcagcctgggctgcatatgcatagcaggatccctctctcagaaacaaacaaacccagggaagccagaagagggctgaatgggagagatcatgccttgaatgcttgagctcttggtttaattcccagtacagaaataaagaaagaaagaaagcagggatgtaattggacaaaatttcaggtttactttaaacttttttgttttttgagataggaactcattctgtagccctagctagcctggctaggggtcaattagtagccagaagatgagaatttgataagttcatagagagccatccactagcctctgcctcaagcgctgggattaaaggtgtgcaccaccacgccttggttcatttcatgagctagccagggagacaagacagtagagcaatagctggttcaaggcagtgcacttcatcttaagatctgtttcaggatcaaggcttgtagaccgtcattactatgccagttgaaactggtctgtgtgggaaatctgactgttaccattccaatcttgatttcttagatccagcttggcgatctgggactttattgtgagtgattccattttgatgttgagttcaggcttagtctaaaacaatggcctcctgtaactttgttttagcagaccatttttggcagagtagaaagggagttctcaagacaaagttaccaccagcagagcctcctcttctaaaagtcttgcttattatcagccggcagccagggagagctgtgttggctcagaggtacccatgggattcgtgactagggtcagttactagccagaagatgagaatttgataagtgtgttttcaagtcctctgaaggtaaactatctgccttattcactgatatctcagagctcagggccttgtacatcctaagcacaagccccactactgcgcctatgcctttagggcagagagaaagcaaaaattttcttcaatgctggatggagggtctcatacatgctagaaaatgccctattattgagccatcccccaattcatacttttcctaatattgcagaattagatagcctatttataataaatttcctagcaagctaagggattgtttgttgttttgatttatgtgtgtgtgttgtgcacatgtgtgcatatttgaaggtgtgcctcagtacacgtgtggaggtaagaagacaactcacagggttatttctctcctgccatgtctgtcctggggacccagctcaggtctcaggcttcacaccaagtgctcttagcccactgtgccacctcactagcccctagaaatgaggtaagggggctggagaagtggcacagtgggtactagtacttgctgcttttcctgaggatctgagtttggttcccaaactgagtggctcacaactgcttgtaactcagttcaaggggaccctacccttttctagcctctgtgcatccctgcacctaagtgacatatacttgtacaaacatatatgcatacacataaataaaaatagatcttaaaaatgaatgagggaataaacaagaatcacagaggtaaaaatttctttcccatattacagagtgaaagaaatggtagagctgggacttgaaactgttagtcggactctaaaggcaaaccatgcttccaagtggattcctcttgcctattttctggatatgctactatttgcatagtaaggaaaaaatgggaagcataaaaaataacaagttaattatatttttctttttcttctgtgtcctggaactcattctgtagaccaggctgatcttgaactcagagatttgcctgtctctgcttcccaagtgctgggattaaaggtgcatgccaccacagcccaacttagtcatattttaataaacaaagcaggagtgtagatgggtgttttatgttattagtttttgctatgttgcttatgcagaggcctgggtctccctcatcttagaatgctgcttgttagacaaacagcaatgacaactaacatgcttgcaggtttgctttgacaagtatgaggcttgttgtccccagtggtttttacctggactgtctcatttagctctctatagaaatgctcatctgtgcatgggaggtatatagcccagtggtagagcacatacttacaacatccaggctctggtttcaatttctagctctaaaataaagacataaatagaataaaggtttatttggaattgaggttcagagataaaatgatttttttgtattttttatttaaattctttaattaccactcatatttacatatccatccccccattctcttgccttcccatcctcccaagttcttcaccaacctccccaacctcccccaactcctccccagggaccttcaaagtctgtcatatcgtttggaggagggcctaggccctccttgctgtatctgggctacaatagtgtccctccataaggaatgggctcgataaaatgattttaaagacacaaaattcttactcttgagtcttagactcacttagttctgtttgacagtggtgctctgagggcctcatagatttatttgtaaatcacccaggagagatttcttttcacaatttaaggtcctaaagaagtaatactattggtatttttacttctttggggtcaggaggggagctggcctcacatttgttgagatccttttgcctctgcctccaaagtgctgggattgaaggagtgcatcacaacatctggcttggagtttgtcaaacaaaagaaagcatgcccaaacagctggtgggcagaggtgtagcttagtgacaggacacttgcctgtcatgcaagaagccggggttcagaggcctgccctgcaaagagaacaacacagatgttaagctggatgtggtggttactcctgttacccctgcattgggaggctgaggcaggaagattgtcaaaagttcaaggccagcttgggtgatatagtaatttccaggccagctaacaagtccctgtctcaaaaaacagaacttaaaccaaagggattctaattttggagctgcggcttttgggcaaatgtctctctgtagagggtaattctgtctacccggctcactcccagacttgtgcagaaaaactggctaaggtgatgggcttcgtttgatttcctagtcaagatgctgggtggatgaaatagaaaatgcttgctctgcttgatgcttccaccttcttcctgtcagctgtcagccgtgcaccatctgtcccagcagcaggctggccttccctgttctcacactgagcacagtgaggtagctctctgtctggtgccttctggatccttctgccacagtctccctactgttttctagttaagtgctcatagtttgtttcatttacaaagaattaaaaaatctgattttgcaatcactttatttttggtttctttatttagggtgtgtgtgtgtgtgtgtgtgtgtgtgtgtgtgtgggagagagagagagagagagagagagagagagagagagagagagggggagaagagagagtgctcttgaatacacagtgttagagcatgcatatggaggtcagattactgatgactttgagtagtctgttctctactctcaccatgttagaacagggactttcttgtttccaacattctgcatgctccaggctagctggcccaagagcttatgggaagttttttctcaacttcccacctcaccacagaatgctggaattgcagttatgtctgtcctactacatttggcatttttatataggctccagggatcaaactcaaatgtttaagttggttatggcaagcacttatatccattgagctatcttgtctaccatttggtttctttttcttctttcctttattttaattttctaaaattttatgtttatggctgcttttcccctacatgtgtatctgtgtctgccacccacagaggcctgaagaaggtgtcagatcttttggaactggagttacagaaagttatgagctacatgtgggttctggaaatctggaggagctcctaatgctcttaaccgttgatctatctctccaacccctgctttctccttttattaggattctttccactgatcatattttggtgtgtggtttatacctccttttttaaaaaaaggtttttttagtgccgggctgtggtggcgcacgcctttaatcccagcactcaggatgcagaggcaggcagatctctgtgagtttgaggctaacctgatctatacagagtgagttccaggacaaccagagctacacagagagaccctgcattgtaaaacaaacaaacaaacaaacaaacattgcagtccttttaatatccgaaggcttgctattatggatgtatgctagcatgcctgccttctcttcatttttattgtgtatgctttttaaaaataattatgtgaatatgtgttcatgttaagtgcaggtgtctgaggagaaacattggatcccctggagctggagttgtatacagatggttatgagctgctaaacctggtgttgggaaccaaattctagctttctgcaagagcagcatgtgttccttaccaccaagccatctttccatcttcccccacctttcttttcttccttcattttttaagatgcactaatatttttatttattgttcactgcttgcatttgaagttcttcagtgacatcctccctttgattctatgccacagtccttaaccacacagagctgcaaccaaccccttcacgtttttgcacaagtttgcccattccttagttccttcttgccatcaaccctaattaggttatttggtgttcagaacaaaggaccctcctacacttacataaagtaggcctatacagatgggtgaaagcacacaaagatggactgggtgcttgtccaaaggttagcagctttgtgaatccacacatccagtagcaatgtcccctctttagccctggtggtaggtaagggagaagctgaatcttgaaagcacccaagtctatgcttctgtatgacttgaccatggcaggcttatcttcagttctttttttttttttaagataatttatttaatttaattttatgtgcatcggtgtgaaggtatcacatcccctggaattggagttacagactgttggaagctaccatgtgggtgctgggaattgaacccaggtcctctggaagaccagtcagtgctcttaacctgagccatctctccagccccttctcttcagttcttatagtgttttatttatttattattttaaagtaaccttccttttctaagaattttgtgtatttctgtttgcctgtgtgtgtgtatgagagcagaatgagcatagttttattgtggaaaagtgaggaagatctctcaagagtgggaggggctccaaggaaggagtaccttcttttctgagttttccacaaacgtatatcagatggcactacactgggtgtgtggatagaagacaaaatgcacagatccctgatgaaattcagagatgcttgaggatttggtgttggccttaatggcaaagcattgttagtcatatgttcttatgattcctgtctttgccaattgctcacatttattcagtgatttactctgtgccaagcaaattctaaaagctttacattcaacacctcacagtattctgagttacctacttttaagtatgcccattttatatatgggtaacaggcacaaatcaggtgactaagttgtatgaagttataattagtaagtggtaagtttgggattttttctttttgtgattttcctttctttctttctttctttctttccttccttccttccttccttccttccttccttccttccttccttccttccttccttctttctttctttctttctttctttcttttggagatagggtttctctgtgtaacacccctggctgtcctggaactcgctttgtatactatgctagcctcaaactcacagagatctgctggcctctgcctccccggtgctgggattaaaaacatgtgccaccactacccggtgatctatttcttaattatttgtattgagggttcatgtaactcagggtagtcttgaatttaaccatgtagcaaaggatgcctcctgaccttcctgcctttttcccaagtgctgggattgtaggtatgagttatcatgctctgcttgaatttgggatttgaatacaggtggtctcagctggccacaatggtgcacacttataattctagtatttaagaggctgaggcagggggatctctgtgagtttgaggccagcctggtttacagagcgagtgccaggataagccccaaagctatacagagaaaccctatctaaaaaaacaaaacaaaaaacaacaaaagtggtttccaagaagctgagtttgactctgtttttgtgtgtttagaatccatttttaagctttgtcaggtctcatgtggaaa

SEQ ID NO: 32 - DNA, 179771 bp, Cricetulus griseus
  modified_base (23560)..(23633): a, c, t, g, unknown or other
  modified_base (23967)..(24012): a, c, t, g, unknown or other
  modified_base (25012)..(25225): a, c, t, g, unknown or other
  modified_base (27207)..(27269): a, c, t, g, unknown or other
  modified_base (27558)..(27642): a, c, t, g, unknown or other
  modified_base (28034)..(28294): a, c, t, g, unknown or other
  modified_base (36588)..(36936): a, c, t, g, unknown or other
  modified_base (40895)..(41191): a, c, t, g, unknown or other
  modified_base (112869)..(112967): a, c, t, g, unknown or other
  modified_base (145691)..(151881): a, c, t, g, unknown or other
  modified_base (175480)..(175497): a, c, t, g, unknown or other
caaggtttcttctgatgcaatgacagttagtcctcagggaggaggcttccatgtcttttccagatgaatttctttaagtcttgtgtactaaagatatgatatcttcagtaatgggatcttattttatttttcttgaaggcacaaagggtggctttataccatttgttatttcttaaatctaacacacttcctttaaaatttagtagaggtgctgtgcatatagtaacttcttccatgtgtggtgaatatatatattcacctgggtagggtggcaccattttagaagaattaggaggtgtggccttgttagaggaagtgtgtcactgggggtgggctttgaggtttcaaaagcacatgccaggcccagtctctctctctctctctctctctctctctctctcctccctgttatgataaatctttctgccaaaagccactgagccccactgccacgtgtgcactttacggccagccgcccacccagtgagggccccaaatactacacagagacttctattatatacaatgctgcttgaccaatgactaggatttctcatctgctagctcagccttaattatcatatatctatatattttataagacttatcttatcagacaccttccatgggcatcctcccttgctggtggatcacatcatgaatctggaggaagagaggaggggaaagggaaccacttcctgcttgtccttgcttaaatatgagtctccctgctatgtcacttcctgcctggatcaccacttctctactacatttcccagaatcctctttgtctcctagtcccatctaacttgctgcctcattggtcaaacagtactttattcaacaatcagtaagatgaacatacacagaagtacattcgggctctctacagcctggaaatccattgccttccttaatacctaaaggatggccaatcatagttattgacctgaaagactgctttttcactatatcattacatttagaaagtgatagaaatttgcatttactgtaccaactcttaataactcacagccagttcagagatatcaatggaaggttttacctcaggggatgctaaattgtcctactttatgtcaacactttgtacaacaacctttgaaataattcgtaaagaatttccacaatccctcatttatcattatatggatgatattcatttatcatattccaataaggaaactttggaatgtgtgtttgacatggtgaaggaagttctgcctagatgagggttacagattgccccagaaaagatacaaagaggagattctattaactataggttgtaagatagacttacagagaatcaggccacagaaggtgcaaactcttaatagtcttcagaagctgctaggagaaatttctcaatcacagacgattattggggtagaaggtcatgacttaaaacatttaaaaatagctcttaaaggtgataaggacctaaacagtctacgaatattatctgccgaggcagaaaaagaactacaatgagtagaaaacagaatattggatgctcatgtgaaagactttagtttgctgagagaaaaagttttaaaagattttagttctcagagagaaaaagtttcccacaggccttggcccattacaaggaagttggccccaaccctgggcacatcctatggtttagacaggggcaattgccaagacaactctctttgggtcacacctggctggccaacagacaatcaaggacttttcagggtatgttctgtggtttttcctctgtagaaaagcaggtcacacctgggtgaccactctaacatgagatcatactttgtaatcaatcactttgtgccccttgcctgtatgctgatctatgattttttcctatataaagagcttgcaccccatgctggggtgtgcagcttccccgatattgctgacaccctactgggcattcgttcaataaaccctcttgcttttgcagctcttggtctggtttctgagtctcagaggctccttgggatcctgaggcccttaggggtctggggggtctttcacatgtagatcggataaaccttgatttagactgcattctggttattttgccatccagagaatatccttctgggattctgatgcagttggaagacactatattagagtggatatttctgccacataaacagaataaaaagttaaagacatatatagaaaaaaaattctgatttgattttaaagggcaaattaagacttcgtcaactgactggaaaagatccagcagaaactatagtacctttaactaatgaggaaatttcctgcttatggaaggataatgaataatggcaaatagctcttactgattttgggaacaattagcaacaactatccccaaaccgacagaattagatccataaaaaagacagtctggattcttccacgtattgtaagacaaactcccaattctggagttcttactttctacactgatgctaacaaatcaggtaaggctggttataaagcaggtgaggtaagtaaagtagttcaaagtcggtatacatctgtatagaaggcagaattatatgcagttctcatggtgcttatggattttacagaacctcttaacatagttactgattcccaatatgcagagagagtcagtcgtcttatacatagagactgcagaatttatccatgataatacagaattaacctcgttgtttttacaattacaggaaacaatcagaagcagaagcaatcctctacacattatgcatatcagatcccataagtgtctgccagacccactagcccaaggcaatgatgagattgatcatttattaattggtagtgtgctagaagcctcagaatttaataaaaaaatcatgtaaattgcaaaggtttacaaaaggacttctccatcacttggcaacaagccaaggagatagtgagaaactgtcctacttgtcctacttgttccttttataaccaaactccactgccagcaggctataatcctaaaggcatttggaggaatgagatctggcagatggatgtcttttactttacaaaatttggaaatttgaaacatgtgcatcatactattgacatattctcaggtttccaatgggctactgctctcaactctgaaaaagctgattctgttattagacacctgctagaggtgatggcagtcacgggtatacctgcacaaataaaaactgacaatgctccagcatatgtctccacaaaaatggaacagttcttcaaatattataacataaagcatgtcaccggtatatcacacaatcctacacaatcctaataggatgcttaaggagatgctccatagacaagctggtaagtcaaaaccccccaaatataggttgcataatgctttattgacactgaactttcttaataccaatgacaaagacaaacagctgcagaaagacactggactacggaaataactgctgaactgagtcaaccagtatacttcaaagatgtactgacctcagtatggaagcctggacacgtgttacattggggtaggggttttgcatttgtttccacaggagaagaaagcctttggataccaccaaagttgatcaagattcaagttgaaaaagaccaacctctcgacaaggatgagtgacaggtagtaactgaggtatatctcataaactaaatagaaacctcccaaaggaaagggaagtgtattgcttctatcttcacaggaaaactcatttccaggaatccaagaacactacatgggtagatgcttaagaaaagaaggtaattacaaccatcaaacaaaaggaatgtgacatacggtaaactttacagctgtctctcgaataactatttctccttatttcctagaccctatttaagtaaatcagtgctggatttagagttggatttggcttttctcccctaaaatccaagcatgttgtttaactaaactttagagtttctgtattaaatcaagaaataattcagcactagagaggaatttggggactgtctttgtctttcttggctctttccttcaagatgtacactgtctcacaatcattattttccactattgactttttcagcataattacatatacaagcaaacatttctctgctaacacttatgtttgagtcccacacagccaatgaagaccctcctgacaacaatccctggacgctctggaaaaggaattgggccatacctcctagactgcactggatccaacttactccatttcaactgacactccgactagagcttccagaactgacttcaatcaagttgaggatttcaacctagatcttcaatcaaacaaattccatctaacatgggctggatataatgttagagacttttactatactaacattttcttcccacaggaccccacaaggctaccatcatcccatttcagcaggtagtaacttggaggatgctacgcccctgttccctattattgtctgttagggtagtgtaagtctagttaggaatgatcttcttattgtttagggttggtattggaaggagatgttcaggtttggacacctctttcagatgactttagggtttagctgaaatagacatagttaagatgtgcaataatagattattgcatcttcttgtatttcacctttatgattgttagttttggatattttacactattaagttttaatccttttttagactaaaaggggaattgtagggagacacggtaaccatgccttgtaagggctggctacaggtgtgtctgaacaggcgtggtcaaagtgaggtcagaatgacgcggcatggactcttaagtgaccatgagcacatggaatctctcttccctttctgctgccccttctctctggcctcactgctctggcttgcatttggctggtatttatctgaataaaggtatcttgaatctacaagctttttccttcacctctcctcccctgctttcctctcccatctcttcccctccctccctccctccctctccctcacccaccctctatcttcacctgtggatcaggatatagctctcagctactgctccagggccatgcataccacctctccctgtcttcatcataattgactaagcctatgaaactcttagcatgtccccagttaaaagctttcctttctaagagtttccttggtcattttgtctcttcatggaaatagaacagtgactaagacaacatgtatcaacaaaattcctcaaagctatcatttgtatcttgctttacccctcagcaggcccactatcaggaaaactttgtgaaagaattttctacatgtactctttttattccttgtgatgagttcatgcttcaatttgccatcttatctaaaacacccaaaacacatcaactaccttaaaatacctcaaagagctcttgctttcatcctgtgtatgaccactcagcaacacgtggtgttcccaggtgctttctatctcaactaaggctattgtatgcttgttgttttcctttaaagtattcccttccagtctcctttgtctttactccttttctgcattctacacattgtgatccctcagtttttaccacaagcttctcctattttgtgcttccctttcatctagaattgttttattgctagctttaatttattatcctagccaaacccttcctttgggtacacatattagaatgactatttgatatgactggagaccctaaaagcatttcacttccaacaaatccaaactgtactcgggattgtcttagctttaaacctccctcctcattctgcatagcaatcccactgggtcatctacacttgcttaagcaagtaacaaatctggggatcagcttagatgtctttcttccttactatgatggtttccatcaagttcatgtaaaaatgatacagctcatttttttccagttgaaatggtcatgtcttgtatacttgtgtcaccattgtatggttgtcaccttttatttgtggaggattggtttaaaagacttctcataatcaacagaatcaatggatgccattctcatataaaatcacaaagatttgcccataacttaggtagtcttcctgtgagctttaagtcagctccagatcatttcaacatgtaaatcaaaggtgatgctatgtaaatcattggtacactgcattgtttagagatattaaaataaaattactttgagattttatcttaccccaatcagaatatctatgataaaaaaatgacaaagaatgctggtgtggatgtgttgaaagaggaataattatccactgctggtgagagtacaaacttgtgcaggcagtgtgcacatcaacgtggaacttttcaaaaaagctagaactagaactttcaaaggagcgaactataccactcttgagaacataccccaaagactgttgaggtatcctactatcaagatatataatcattcatgctcattgttgctttgttcacaacagggggaacatggaaacagcaaaagcttatcagctgatgaatatataatgaaaatatggaatatcacaatgggatattatccagctgttaagaaaaatgaaataataaaatttacaattaagtgcctggaactagaaacaatcattctgagtaaagtaagccaggaatcagactctagaatgacaaaacatttgtgtgtgtgtgtgtgtgtgtgtgtgtgtgtgtgtgtgtatctttgaatcttcagataaatattttccatttggaattcatacagagatcaggaaattggtaaggggcaatggggagatttcaagagacaggagatagaatatggtggcataaaggcttaaaagggagtaattctgttggaatgattgaatgagaaaggggatggcaaagcagggtagagggaggaatactagacaaatactaaagacattttgaaaaggtcatggaaacctactgctgtagaagatccctaaaatatatacataagcacatctaaaaagagtttaaatggaattgccctatgtaaaaataatgcccaactgaatactataggataacaaacagaaagctcagtaccaggaaatgggctacctcttttgaagttgttggacaatgaagtactatagacctccaaacattattggttattaccatttgttcttggttacactccagaacttggcagtatgatcctgttgttaaagacagaatatatgtgagtcacagttctgggtgaatctagctggtttttatttggaagcttcatccatactggttagctttcagagttctagaatgtgctatacatggtactagaggagaagagtaatcttcagtcatttccagctatgaaccctgagaactacagtaatgagtggtcaacctgtcaagacatgaccactgtgtaatagtgtcacaaatatcatgagagtaactaatgaaattcagatttcagattggatttagggtgtactctacaagatgaaaccatatctgacaccattatcaggatgggagcccatggcagaaaagtcttccactaggtcttagagaagaactgaatactattattctgttgaatggacatagcaataactgactccttatcattatacctgtagatcaatgcatatctctaccttcatctgagaatcatttatttgcagtgatggtgagtaatatagggatccctgactggtggatgggcagagaatagaagactctggattggattgttcagtcctaaatgggacactgcatcacactacttccttccaagctcaaggatgttgatagaagagagcatataagaactataagagctgggtggctacaagaaagcagtgtcttctagacacagcagttgttacagcatgcaaaagacctaccatggagagtggaagctaacatgaaattccgcccccaccccagccaaggagctgttggtaactggtagttgctcagagaggaagagtcagtttctttgagtgtatttgcaagtgggtcatgttccagaggaaggaaggccacacatctgagaacatatgaacaacaaaattagacctgtgacctaagcaaataaaaaggtatgaagttgggtgagggaagtggaggtatgtctgagaggagttgtgtgttgaagagtcattatgattaaaaaatcttatatgaaattctcaaagaattaatacaaaattaagatgctatcataaatcatacagagattttgattggatttcatttataaattatgatttcatgaatatctgagcatctgaaaatattgcctccctattccagtctcatcagaactttatatttacctttggaacccccatattttcaggaaagttaagtttgtcaatatatttcacctcttttctacctaagtagacactgttatagggactttcagaactgtgttgcgaactgaagatttttcaaagaggagtcatttgatcttccctggtgtttaaatttcactgatggaaagttgtgatcttttgaagagaaatgtgttataaatcaagaagcctaagatgtattgggctatttcagagccttggacaagtctttatcgttggcctctgcatttaacgtagcatttttgtgtgaccagtagataaaaccttaaaatttgtgttatgcttgatgcacttctagcctctattaaatattaaagctaggaatgactggagactcggatcattatggaagtttccctgcctagttgagcatcactggtaaattttacagaagatttctactcctttttaaatttcatctactttaggactctgtctactttaggactaagaaagatgttttttctattcattaatggagccatgtctttggagaacatgactttgagagttgtggtgttaacttgtggatatatttcagggagaaaaaaaaatttatgttgactcataatatgtcaccctcttgtttcaggagttttgtctttacattgagagtgagattgtgcacaaagggtgaatctaacttaggtttggtgttattctgtagtcagagcttgatatgtaatgaagtcaccaatgaactcctggatccaccttaagtagatacttattgagtagtaggtaatccctcaattttttcttggcttcaaacccatgttgtgctttattactttttaaataaaattgtttgtggcaatacatcttaatattcttttctatttatagctatgatgtggtgttcttgacttccttaagatttcttttgtcttgtttgctcttgttgatcaacagtaaagtttgccttgtccagacacttcaacaagaataatggtctctttctttaagaccccaaacttaattctaacaatttgggtctcagtctaggatcctagttcccccgagggagaaccttagatctcttcccaggggaaaagtgtcccacaagttttggtttttgtttgtttgtttgttttttctggtccttgggtgaatggggtctttggtactatccaggtcagcaaaatgccccaggtttcaaagtactgaacagcacagggaggggttgctcagggaaattactgtggtgataaggaatactctgtgcacaaaccgaagtcaagaaatgctgcgggaacagcaaagtattcctttagaggttggttattctaggggttgaggcaagtgtttgatgtgaaatttgggtccaagaaacctccataaagggtcgtggagcacaatattccccatgattgggaaaagaaaaacctaaggcaaaaagagctctaaaagtaaataaataaaaggaacaaataaaagccaaagaaagaaaacatccccctactccaggggaaatcaactcatctggctggcccagacattccatcaaccctccccaccctaaggagagactgaacaatgtgaggtctccacacttgttagtctccccgtcttccctctctgtattctctcttttatctctcattgccagctccttctgagaacctagaaaaacttggatctggtctggaggaagggacaaagagtctcttggtgtggttacttctgattgccttagatgatgccacctcatagctgcttttctaacatggtaaagtgccacacagataggaccccctatggaaggcctcaccctccctggggagcagaaagggtttgggataggtagggtgttagttgcagggggtggggggggaggtatgggaaaaggggagggagaggaacctgggattgaaatgtaaaataattttctttctaattaaaatttaaaaatgaaacaaacaaacaaacaaaaaagcgccacacagaaccactaagttttaaatcaggatgtactattttcacacgttggcttccaaaggtcttaaattccagccaacatggagagtcgcatgtccatttgatctctgcccacaccatacttgagcggtataaaatggagccaagaaacatcttgtgtttgagaactgagaagagggtaaaacatggtccagataacaatactaggcaccaatagttacactttgtgtggtaaaatatatgaactcaactttcatgaattaagaccaaggaattccttcccctgttcctttgttattagggccttccagcctagaacacaagtaccatctccttctatatcaatgctaactaagatgccattttttaaagaaatgggtaaaattggtcatattttttttgttctgttttggagacagggtttcactatgtagatcaggatggcctccaactcacagagatttgccttcctatgcctcatgagtgctgggattagaggtgtgcatcaacatacctggtgggaactatgcacatttaatctttattatgtttgaatctcccaggaattgtggtcttatggaggatagactcactttaccatggagtctgagctcacaaacagaaagaaaatgtgttttggctgaggacagcataaaatggagatgaccatatgatctggccactatctttgtcaatgacatcataaagatgatgaataccaggtgactttggcactatcttggttaatgtaattacatggcatgaagcaaattggtgacacccataaacttcctggtgacactgaggcctcagggacttacttcttgtatattgtacttagggagtaatgccatatctccatgatgtttatttgttctgctttattttaacttctgcacattgctttgcatgatatattcactagcttctagaggggacttaaagatggatgtagatccaggacaaacaggttaaaataaaccagataaaatacaaatataatccagtaagttcacagtttaagagtcacatcttaaagagtggagaattcaagcagacagtctttttatagtccccagtgaagaaatggacaaaacagatatccaggcccttctttgttatgcatactatttatatcagatacattatatttttaaaactttttgttgattctttgtagattttgcatcatgtatcccaatacctttgtatctaccctctgcctttgcaatcttccaaaataaagtttaaaagaaaaacaaaaatcccaaaccaaataaacaaaaacaaaacaaaacaacaaaatctgcctagggcagctgaagtgtgggccagtgagtcacacaatataccctttagtccatgtaccttcacttgtgtttattaaaatgagtcattggtctggttcaaggttttggcttcttatacactatcaacactgggctcttactgggactcctcttagatatcctgttgtcctgtggcatggagattattcacctttggatctgcaggtctggccccttcacatgccccagcagcttatagaagaggtggatgttggggtggactagttcattgccctagttctgggcctgagaggtagctgagttggtcagcctgccaactttccctcatcatcaccaccagggtgagctctccagcactgtcccaattagttcaccaaatgtagcaggtagcaaggagcctaggaaattctccatctctcatgccctcagggcaggctcatctgcattcactattcttttgcctatacaaagggcagggaccgctctcccgattgctgcagttggtgagggacagtgccagctcttctattctcatgcctccccactccctggccaatgaggccagctctcctgcctgccacagtcagcaagaggtggggcgtgtatttccctcacccatgccaccatatggcatagaatggggggcatcagctctgctctcaccctctgtgccagctcagctgtgcctctgccagtaaggtcagctctagtgttttgtccaggtgaagtgcagggtctgctctcctgagtgctgtggcccatgatgggtagggccatctctcctactcttgtgatcctggggccagctctcccacctgctgcaggtggcaaggggcaagggggagagggaacctatttcttacccatgccatcatatggtagaggaggagcagcggggtcagttttcctgcactcaggctggctcacctgtacccctgcccacacacagggtcagctttactgtgatggccaggtgaggggcgtagccctctctcctgagtcctgcagctggtaatgggaagggccagttctacccaccacaggcagtaaggggtaggagcaggggtggggatcactccttcacccattctaacagatgaggggtgggtccacatctcctaggcacacttgttgtacccctattgacatggtcagctttagcaaggtccagtcttcccggtgctgcagcccttgaggggcagggtcagctctcctactctcctgacccaaactttcccaccatcatgaccctagttgatgtcccagatgctgggcatctgtgtggcctttgatggcaacatgggccattgacatcaacccagacccagtttatggtacgaccacagacccagacatggtccttgtgcagcctgggcccagatatcatcatggccctagctggtatcccaggttacctagattgacatggctccagtggcagcatagccccagaacactaacatatcctgaggagacagcccagaccctgaccatctgctctgtcttctgatatctgtagcaagagtcacagatatcaacacagatcctggatgggataggaccatgcagatatattatttaaataaatagtaaagtgacttatcagataggtgtatccatttgtcatgttaactcatgagaaaaggaataaaagctaggaactaggaactacagtggatgttcaggagaaggaaacaaagatgtggaatatcttttaacaatgtttcatcttacagaagggtggttatcagtgaagactctcagtcactgtattgttacccattgggatctcttcatccaggagccttgcttgaggagggaatgtctaaggcttttctgtacacagttctggcctgaatataacttaaaggataaagagtgcattgatgattacaaagtggagtcagagataggttgataactggtagtttattgggggaaaatactcactcaagggaaccagtgaccaggtttgcacctgagcaggatggacccagaaatgcttaccggtcagctcagccaagtgagagagagccaagtgctggccttcttaaacccttgtttaagtgggcatggtcagcaatacctataatcagggtttctccctacaagagtggtctttatagaaaaacaaatgcaaacaacaaacaaacagcagtactgtattgccctacaacttgatttctttgtaggagggggggtacttactaagtttttcaggttgtctgcctctgtttgcagatgtacctaaatagattgtgggtattggtcaccccaagtgtagccagagagagccttagtatggatgcttgtgaagacagatacttctgttggtttgatcctccttgatcatggatactgattgccactcacccttgatgaagatatcagaagatgactcttcatatttaaatgttctgtttggtgaggttctcatatattcaatctgttaatccctgttccctgtacacaacccaaaagatgacgagtcatgtaaacaaatctataaaggttataaagaaataaggaagattggtgctttggggcccactagttgtcactggattcagcagcaagtctctgaatattgaatgtacacctcgggatgcagctttacaaaggaatctcatgagataaagatatctgtagtaaaaacacttgataggaagctcatccatggagagactagagaagatcctctatctaaagatctgtctatagtaaccccagcatcagagttttcttaatggatttcttagtctagttttactggatgctgcaaacatcaatttgatgatgttctgctatatatttgctgctgctttgtatcttctacatacactaattccaaaacaaatgcaagggtatggtagcaactctatgtacagcataaaaagtgtcttgtggttttttttctttttaaataaggtttaacttaacagtatgtcccaagaaatattaatttattagattattttatgtattatcactgcctaggaggacagcccccagtagcagcaagactctaaagtaagtcacagcattggtgcatagtagacttttctatctgagagggttacagaaaaaagacactcacattttctcttgatgttttccttctttattctctatttttctacagtttatatatcacaacaaagtttttcaggcaatataagaattacaatgtggctaaattacaatgaatacaaaacaaatagtaaaaaaaacagcatgtttttcatatcccttacatgattaaacattttgcatgttacaggtgaaaaacaaattatcctaagaacccatgtacattcaccatacccaaccagcttgttatagattaaccatgtagacaagcaaggtattcttctcagggaggtcttttactagcaggttatattttgcagttgcaaaggaagggccaattactttttacttatttttaaaaataatcttatagggaatcttaaagaaatcacaaacctaaatttttatataagacaagaatcagttagctctactttaagccttcagggtgcatatcaatagtttttttatatcaggatagtgagggcaggaatgggtacaaggagttaatcatcacctttgatcatcaaccaatcctattaagaaaatatgtcagctaaaaacacttgggctgctttgtattttgacctcagctttgtgtccttgtgaactttagattgttttcctgggattatccatattaaaactattattaaaacatctcatctaacctgaagttattttaaggctttgtttcagtcagtgatgcacaccaaaacctataactgcatctttcagcattaagattaaaggattttgagccagcttggctcttgggactcaattgttttgtttgtctttctttcatttattttttgcttcatgtcagaaattttactttactattggaaaagagtattttgatttttattgtaaaaccccatttaatttcaagaattaattttaaattaatttaatttaattttaaatttaccactcagatgtgaattgaaaaacttttattcttgtaactgtgaatattatatatatatgtacatatatataatttcaattttttatactcaagttactcaattgtttactcattttatacaccaaccatagttctctttcccttccttactcctgctcctcccacctccccccacccctcatccactcctcagacagggtaaggccttcccatggggattcaactaagcctggcatatcaatttgaggtaggacaagtccccctcacacccctgcatcaagggatatgttgatatttatcaagggataaatcctggtcccaatgccaggagccccaccaacagagcaagccacacaactgtgattggtttctcagaaaattgggaatttacctcaagacctagcaataccactcttgggcatatgcccaaagaatgctcaatcatactacaaggatacttgcttgactatgttcataacagcattattcattaatagccagaacctggaaataacctagatgcctctcaactgaaaaatggataatgaaaatgtggtacatttatacattggagtattactcagtggtaaaaaccaatgacatcatgaaatttgcatgcaaacagttggaactaaaaaaaaaaaagtcatcctgagtggtgtaacccaaacctagaaagacaaacatagtatgtactcactcataaatggatattagtgtaaagcaaaggataaccagattacaatccacagccctagagaagttgggtagcaaggaggaccctaagagggacatgcatggatcatcctaggaaggggaagtagatgagatgccctgggaaaacggggaggaaatgagagatgagaacatgagggaatgggatggttgagttgggggagggaaaagagagggagaacaatgaaagagatatcttgatagagagagccattatggagttagggagaaacctggtgatagaagaattctcaggaatccacaataatgaccccagctaagactcctagcaatagtggagagggtgcctcaactggctttcttctgtaatcagattggtgtcatagaacctttatccagtaactgatgaaagcagatgcaaagatccacagccaagcactgggccaagctctggagtccatttgaagagaggaaggaggagcaagaggggatcaagagcatgatgggaaaacccacagagacagctgacctgaacttgtgggagcttatggactctgaactgatagctggggtgtcttcatgggactgaggtaggccctctgaatgtgggtcatagttgtttttcttaataactaacttgagctacatctatgtggctctttaaataaaactcacgggccttagctgtgtaagatttccttgtatttacttttattcatcaaaactctatataagctaacattattgttgtcagttagactagacagtttagggaggaatcatcttcatataatccacaggtaaaaatgcccagtagaacaggatgtttccaggagataaacacactacattacaggcagaggggatctccccacacccattcacaccatgccagataccagagaaagatagtagcagcagtcctgtaaaggcaaggcagaagttaaagacatttatggttctgtagtctcagggccttgcctaacagagattgactgacccatcaggaggtttcctcctggtgggctgacaccttgaaattcaaatgccacctgctgctcctctgacaaggcaacaggcaatgtatgcagtttctattcagttttttttttttttaaagtgttgctatgcagcactattctaagacaaacaactcctatcttcataagaccagctgtgcctgcacacaagagatgatcacccttgggtttgtagagggggtaaagtgggtcactgaatcctcaatctaacttctcttctagccacttgtatgcaattgagccttaatcattgtggcctagtggtttggctaagaaagattagggacaggaggtccacttatgcagctatgggaaagccactgtacacgttgtgtgggggcttccagtctggctgctttggagatacccctgtgagtaactgttcgcccacactcagtgagtgaaccccatacactcattgtttccccaggatgaattttggtgagactaaactttggtttgttgtcaggacctcatgaggaggggtggagggctgtttagtccctctctatctgggagaaaaatttcctaacaataaatttgttaatgttattatgtcttatgttattaaaataagtaaccagtatggagaagaaaatgttacaaggatgcaaatatgtaaatgttttaataaagaaggacatagatagatgaagattaagatggttggatattttccaaatagaaaagactggaaaaattttataagttatgaaggtcagagaaaattatataaggtacataaaggatgaaacttagaaatgatgcatatgatattaaagtttgtaaggacaaagataccgaatacaaggcttggctaaaatgtatgtctaatcaaagttagatttagagatgtctggttattgaaatactatttaacctgaatggtgtgactaggtatttaataatcatacttggaggctattcggatgtgttcagagagattgaaagagagaatattttctccctagctctccaaggttaatgagatcccacagactgtggctcatctctcaaaatcttctctaattgtggaaagatttcctcagcacttccaaggaaagccacagtcaggctaagcaaggcctttgactcaccctcacactgatggataaccagtaaaagaaaggccagaggagcctggggtttctctcaaggccaagagacccccctgaggaccagatcttcaactggcctggacagtacaaaaagaaaagttaatcttggccattgcagtcataaacattcaacaggaaagtataaccaaagactaggagtgtctgagcctgatagctaatcaggcttcatacctgggaaggggagtgtgaattgaagaaagaagcaaacaagaaacaagagatagggaggacattcagtaaacactgaatgtgctcaagtttaatgttcaaagtttttaaataccccaattaaaagagggggagaaggcaaaagacttcttttctaatgatacaaggaacaagcagagtaattacttctccaatacccaaaatatcaagtaactacatcctgagttaagtattttgttgtttggcaggacatgaatcgaccacaccttaggccaagaatcctgttgtatttacatcctaggccagtcatctttgatgtttcaccttggaagaacaagggcaggtaaaaactctctgaacataaaaatggaatggggtcaattccgtgggttctcacagaggattggtaacagtacaaagaactgaactatccacacattagatgtaagtctccatcagatgttatttagacaactatacctcactaaaattttcttcctgataaaaagaagttgccccaatataagacttcagatcttggctcactgtagcacctccctacagccatgggagaaaggaccactattgttttaacctaaaaattaaatgatggataatcacttctttccccatctagaagccaaatgagaaagacattgtgttgacttttagctgatgcagtagctataaaaaagcacaaaagcagactgttggttctgtgagagtacagtgacattaccaactggaccactccatgggtagaaagaaagatttattgggaagagcagaagtgctcttaacatcagagccacctcttcagctccagatatttatctcttgattgttactgggcactttaatatattttaaaatatttcattatgagaattttgtttttcaaaagtcattgtaacaaattctaaagaaataataataatgtataatatttacttttaatgatgtgttaaatgccattgtctctacattaagtcttatgcaacctaattagctaacttttaagtgtgaccccaatttgtggataaggaagagcagacataaaaactgagcagatagttcaaactcatgcagccactcacactaatgagatttgaagcaaatcatcagacctgtacccttgatcaataggcatttacaaaattcacttgccaattattgtaaaatatttattgagttgtatgaactcgttagaattctatgaaatcaccaataggaaatttgtaagggccaagttcctgccttctctcaaggctgagtaacatttacactggtttttctttcaggcaaaaggcagaagtaatgagaaaatttcttcagaagattctttttgctttgtctccaggcaaccatcacggcttgccaaatagagcatgcaatactctttaataattgcacaatcatatttatgaacacatatcatcctttacctccagatgcttccagattcagatacaagacacataagttcatacctctgcaaagtgcagaggaagacagaagctagaattgtctgtagtgatgcagttatgtacttatggtcacaagcatgttgccacatgcagcaagtaggattcagggactggaggaaagccctccacctctttctctatgttcctgactcatgtattcagtactgttggcctttgtcattccataaacagcagggggcatgcttgcctttctgatctttctccccacactgatgttgagttttgttgaatttcctagtgttcttgatctgtttcttaggatatgttacatcttgtgttggaaatcattcaataatttgggttcattaagagttaaatataaccctatgttcacattcttcggtaagagatacgtttaaaattcaaatagaaaaattgaagttagtggattgatcgcttaatttacaaaactcaagttaagtatttgaagtaaagggaccaaacgagtagactatgtcaatttgaagtcaaaccagaacactttctgtgtctggttgtgtacacactgtaatttaacatggattgtttgcatgtttcaatcgaaccatccccagcattagatgctattattttctcatcttagaggctttgcaactttagggtatgaaagaaccaggacttgtgatgtcttctttgtaccatttgtcctcaccagatgtagtcaacacttaatttgggaagactgtttagagagtataaaacatatttccccatgaaacaagtaatagatatctggtatcatcctaactgaatatctgaaaggtaagtgttccttttaaagttcattttgcctgtgtttatttttgaaataataatagctaattatttcttcttacaaagaaaatttcctattttaaaatgtttttcttctttgcaagaaatagatacttctaatttttaacttttagaccaactccatgctttatttatgaacctggaagaagatgaaaagtaacttataggcagcatttattcacttaaagtacatttatgaagactgcagattactgttgaaatagtgccacaaagccttccaaagatgactgaggactggaagtctgtgctgtggagcgtcttctgcttgtgccagctctccctgctctcaaaggtcctgtcctggctgcagtggagcatgactacctcctgttcttctcgccaagtgcctcccatggaaattcttgaaaaataaagcaacatttcaacccacactttaatgagtggcctggaatccctatccgttagctatctcagaagtgactcatacaattgtctagcctgtgctttcctaacattttccatccactgtaagttatttttccatcttttactgctagagagcttttcatgtttgccagctgagaaactagaaataaatgaaacctatagtttcaaatttgaatgggctgctgtttgagctttttaagtgcagtagtgatctagtgtctggcagaagtacttttgggaaaatggacagttagaatgcaaatgtaagttactcacctgaaatttacttaatgtgaagtcaaaccctgtaacctgacctgctcatgctatctactgttgtcttttgtagtcactcatttgtttgttaccgtttgttactgtggaagcacctttaggccacccaaagaatctaggtatttaatttcaaagcaaaatcaagtcctgccccatcaattagggtagtgtctgaaatacaagacaagtgggatattgtaattagggcttcaagtatgttctctggggtaactgggggtgggggtgaggaatatgctagttatgtgatttgtgaaacgccaagtgttcagatatcagctgatcactcatttgcttcctggagattctcacattgcagttcacaagagcagtatgtgtgaaatgctatagcagaccgagaagttacatttttaaagaacaacctatatggtaaaaggcatttccttgttgactcatatttttcaaatttctgcagccctaaactttagcatttgctttaccagtaagtcagaagccacgtcttgggtgacactcttcatcagaagcagagcagctgtggggagacatggagtagatgactcagggctttggtagttctgctgtggtagttgtggtatgtgaccttctgaaaatcagtgatttcatcttgacttcaagtgtttctaaagtatttcctactttgtctatctcatgagatttttgttttgagcatcaaatgaaaggatacagagagaagaaaatggtagctaagatgctaccatttgtcacattgttctatgcaggcacaggctcaggaattataagctgagttggctttttacggactttgctagacactctcaattacagacaacagctggcagagggatgttttctttttcaaataagaccttaggaagtttgtgttacccaaacataacttcccttcttcattagacttgtaagaactgactgtgacttattaaacaaaagagcggtcattggccaggaatactcaaatgttaaacaaatagaattaaaagcttcaatggtcctataattgattacttactatgctttaaaaaaactatacatattaaattatattttaataagatatttgaatagagaaaactagtagcacagaacatctccttagatgagaatatctgtttgtggggcccctacagtgtgatcaggatctgcccatctgtccctggtgcatgagctggctttttgggacctatttccctatgatgtgtgcctcacccagccttaataggggagggggcttggtcttgcctcaacttgatatgccatgctttgttgacttccctgataggccttaccctttctgagagtggatgggggaggctagaaaggaggtgggggaagggaactggaggagaggagggaggggaaactgtagttcctatgtaaaataaacaaaaaatttaacaaaaatacatattacagtattacaataattttgataattttcatctgaagtagacaatttctcactatttcttatacatgtactgagtattcttagagttattttttattagttcaaattaggaacaagcttgtttcacacgtcagtcccttctccttcccctcaccctcacccctcctaccccacccagacctaccccctaccccattcaccctccactctccaggcagggtagggccctcaatgggggctccacaaagtccaccacatcatcctgggccgggccgaggccttccccatgtgtccagggcaagagtgcatcccttcacgtgggatgggctctcaaattatcttcttacaccagggaaaaatactaatccactaccagtggcctcttagagtgcagaggcctcctcattgacatccatgctcaggggtctggatcagtcctgtactggcctccnnnnnnnnnnnnnnnnnnnnnnnnnnnnnnnnnnnnnnnnnnnnnnnnnnnnnnnnnnnnnnnnnnnnnnnnnnccctctctgcaactaagttcctctgtatagctatggttatctgcctctgctttcatcagccactggatgagggctctaaaatggcataaaaagtagtcattcaatctcattttaggggaagtgcgtttaggttatcttctccaccattggctggagtgttagttcgtgtcatccttgtagatctctggaagtctccctattgccagatctctccttggacatataatggctccctctaatatggtatctctcatcctgctctctattcttccccccccaactcaatatttctgctcctcaatttcctcctctcctctcctctcctctcctctcnnnnnnnnnnnnnnnnnnnnnnnnnnnnnnnnnnnnnnnnnnnnnngcacctcccccccccctctcctcccctcatgctcccaattagctcaggagttcctgccccttcccattcctggggttcatgcatttatctcctagagtacttcatgtttcctaatttctttggtgaagagggctgtaggctttatttgctctatgtctaaaattcatatatgagtgagtacataccatgtttttctttttgtgactgggttacctcactcaggatggtttcttctagtttcatccatttgcctccaaatttcaatattccattgctttttttctgctgagtagtaatccattgtataaatgtaccacattgtctctatccattcttcagttgaggggcatctaggttgcttccaggttctggctattacaaacaatgctgctatgaacatggttgaacatatgtccttattgtatgaacatgcattatttgggtatatgcccaagagaggaattcactttttaatttcattctttggtgttttggtggctagcttattgagttcattgtatattttggaaatcagccctctccaaagttgctgtacaagtttgcactcccatcaggagtcgaggagtattccctttctccaagtcctcttagcataacctgtcattgattttcttttggtgactgtatcctttgccttctcagttttaggaggtcccatttattaattattgatctcagtgcctgggttactggtgctatgtttaggaagtggtctcctgtgcctattcggtcatggttatctcccaccttctcttctagaagattcagtgtggctggatttatggtgagatctttgatccatttgcacttaagttttgtgcatggtgacaggtatggatctatctgcaatcttgtgcttgtctgaacccagttatgccagcaccatttgttggagatgctatctttcttccattgtataaatttagcaactttgtcaaaaataaggtgttcgtaggtgtgtgggttagtatcagggttnnnnnnnnnnnnnnnnnnnnnnnnnnnnnnnnnnnnnnnnnnnnnnnnnnnnnnnnnnnnnnnnnnnnnnnnnnnnnnnnnnnnnnnnnnnnnnnnnnnnnnnnnnnnnnnnnnnnnnnnnnnnnnnnnnnnnnnnnnnnnnnnnnnnnnnnnnnnnnnnnnnnnnnnnnnnnnnnnnnnnnnnnnnnnnnnnnnnnnnnnnnnnnnnnnnnnngtctgtgaagaactgtgttgggattttgatggggattgcattgacgctgtagattacttttgtcaagactgccatttttactatgttgattctacctatccaagagcatgggagatctttccattttctggtatcttctttaatttctttctttaaggactcaaagttcttactgtagaggtctttcactgttttggttagtgttaccccaagatattttatgttgcctgtggatattgtgaagggtgatgtttttctgatttctttctcattgtatttatcatctgtataaagtagggctactgattttttttgagttaattttgtatcctgcttctttgctgaaggtgtttatcagctgtaggagttccctggtagagttttttgggtcacttatgtagactatcatatcatctgcaaatagtgaaagtttgacttcttcttttccaatttgtatccctttgatctcttttttgtctcattgctctatctagaacttcaagaacaatattgaagagatatggagagagtggacatccttgtcttgttcctgattttagaggaatcgctttgagtttctctccatttattttgatgttggctgttggtttggtgtatattgcttttatcatgttaagatatgttcctgttattcctgttttctccaagatctttatcatgaaggggcgttggattttgtcaaaggctttttcagcatctagtgagatgatcatgtggtttttctttttcagtttgttaatatggtggattacattaacagattttcgtatgttgaaacatctttgcatccctgggatgaagcctacttgatcatggtggataatttttctgatgtgttcttggatttgattcaccaatattttgttgagtatttttgcatttatgttcatgagggatattggtctgtggttctcttttttagttgtatctttgtgtggcttgggtatcaaagtgattgtaactttgtgaaaagagtttggcaatatcctatctgcttctattgtgtggaacagtttgaggagtactggtattagctcttgttttaatttctggtagaattctgcagtgaagccatctggccctgggcttattttggtcggaaggcttttgatgactgcttctatttcattcgggtttataggaggatttaaactgcttatctgttcttggtttaattttagtaaatgatatctatccaggaaactgtccatttcctttagattttcaaattttatggagtacaggttttcaaagtatgacctgatgattctctggatttcctcagtgtctgttgttatatcccccttttcgtttttgtttttttttattaacatgttctctatctgccttttgattagtttggctagaggtttgtctatcttgttgatcttctccaggaaccatctctatgtttcattgattctttgtaatgttttcctagtttctactttattgatttcagccctcagtttgattattacctggtgtctactcctccgtggtgagtttgcttctttttactgtaaagctttcaattgttctgtcaattctctcatgtgactattccccagtttcttcatatgagcacctagtgctatgaactttcctcttagcactgctttcaaagtgtcccataagtttgggtatgttgtgtctacattctcattaaattctaggaagtctttaatttctttttttatttcttcctcaacccaggaatggtgtaatcgggtgttattcaatttccatgagtttgtaggttttctgcaatttgtattgctgttgaattctagctttaaagcatggtgatctgataagatacaggggattatttcaattcttttgtatctgtggaggtttgctttgttgccaactatgtggtcaattttagagaaggtgcttttacaaatatgggtgccttcatatttggggcatagatgttcaagattgagacttcatcnnnnnnnnnnnnnnnnnnnnnnnnnnnnnnnnnnnnnnnnnnnnnnnnnnnnnnnnnnnnnnnattttagtttaaagtctaatttgttagatattaggattgctacaccagcttgtttcttgggcccatttgattggaaaatcttttcccaaccctttactctgatttaatgcctgtctttgaagttgaggtgtgtttcttgtttatagcagaaggatggattctgtctcatatccattctgtagtatctttttatgacattgggggatattaatgtccattgattgtttgttcttgtttgctttggatttattgttggtggtgtcattatgtgtggattttgccctcctgnnnnnnnnnnnnnnnnnnnnnnnnnnnnnnnnnnnnnnnnnnnnnnnnnnnnnnnnnnnnnnnnnnnnnnnnnnnnnnnnnnnnntgtagtgctggatttgtggatatgtattgtttaagtctggttttgtcatggaatatcttgttttctccatttatagtgattgaaagttttgcagggtactgtagtctgggttggcatccatgctcccttagtgtttgaaagatatctatccaggaccttctggctttcaaagtttccattgaaaagttgggtgtgattctgataggtctgcctttatatgttacttggactttttcctttgctgctcttaatatttttctttattctgaaggtttggtgttttgattattatgtgttgaggggatttctttttatggcccagtctgtttggtgttctgtaagcttcttgtactttcataggcatatccttctgaaggttggggaagttttcnnnnnnnnnnnnnnnnnnnnnnnnnnnnnnnnnnnnnnnnnnnnnnnnnnnnnnnnnnnnnnnnnnnnnnnnnnnnnnnnnnnnnnnnnnnnnnnnnnnnnnnnnnnnnnnnnnnnnnnnnnnnnnnnnnnnnnnnnnnnnnnnnnnnnnnnnnnnnnnnnnnnnnnnnnnnnnnnnnnnnnnnnnnnnnnnnnnnnnnnnnnnnnnnnnnnnnnnnnnnnnnnnnnnnnnnnnnnnnnnnnnnnnnnnnnnnnnnnnnnncctttctatttccagcatcacctcattctgtgttttctttattctttctatttcagctttcatgccttgaactgtttcaagtgcttccttcacttgtttagttgttatttcttggctttctttagattctttgagaaatttgtttacttcttgaattctttggtttgtcttttcctccatctcatgtaattttttgcttgttttttcttccatttctttaagggattttcttgtttactctttaaaggactctatcattttcttaagataattttgaggcccatctcgtcttcatgctctgtgttgggcttttcagatcttgttggtgtggagtccctagattctggggggtgccacataggtttttctgttattgagtgtgttcttactttgtcttcttcccatcccttcttccagtgagtgcaggtggcttagcttctggtggtagcaggatggcagagggtggtgggtggacaagggtgaggtgtgtccagactcacagtggaccttcctgaggctcctgcacccactgaggttagggcaccgctgcagggcagagggcagggtgaagacaagaatgaggtgtgtctggactcagggtgggccttccgatctgggctggtctactcttgtccgggggttggggtatttcaggcagaagtgagcagaggttgatgggagaggttgggaaacagcagcacccagactcacctgaggctagggcaccgctgaaggacaaagggcagggtgtagtgttttgttttagatattttattaatagaacgactgtttcaacaaggcatattaatttgaattaatatggtatatgaaaatcaaggatgccagtcactgttggctagaatatacttttcagatctcaatagcttagcaattgaaacattttatttattgaaataaaaagtattgacagggatgttgggggtgtatgcattaaataccagtactcaagaggcagaggcagaggcaggcagatctctgtgagttccagaccagcctgttctataagaaccagttccaggacagctttttgaacccccccaaaagaaataaagaattcttgtctatttttattttaattgtgtgtatgtctgtgcttgtctgtgtatgcttgtctgtgtctgtgagtgtgcacgatcttcagaggctagaggcatcaaaatttcttggagcaggagttacaggcagttgtgagccttctgacatgggtgctggaaactgaacttgggttctctgcaaaagccatatgtgttcttaatcactgctctacctctccagttgggttttcctctttttgagtgtgtgtttggtgatgtgttttacatctgagtgtacaggtctgcatttatgagtatacaaacagaggctagagtagaatgttgggtgttctctattgttctttgtgttactaccttgagacagcatttctcactggaagtgaagcttgccattgcagctatagtgagctcttggaattcatttgcctccacctccccactgctgtgtttacagacatgcatagacataactagctttttacatgggtcctggggatttgaactccagtctcatgctttcagtatgactattcttaaccaccaaatcgtcttagctcctaaaagacattatgccattgcagaccaacatcagggtcctgctctctgctgctgctgctcagtgacactgacagaggatctagctgtctccttaaacttgcctgtttcaaggcaagagagggtactatagtctcccattgtcttagaattaacactcattgcttagtttcccattttttagacagaatgagtcacatttcaaccctcctatcttccccccaaaagcatcagaaagtgaaatttaccacattcctaaaacaaaaaggagtagaagcagaagcatttggtaaatagctctaatgactaaaggtgaaaactggagttcatggaaattaactggagatcattatgttatgtgaaataagtcagccctacaaaaataagcatatgtgttcccttttgtatgtagaagctaagaaaaacagcaacatgaaatgaaggtgaatagttagggttgcagaaagaggaaaagtaaaagggggataaagaagagcaatagaagggatggacatgatgaaagtaaattatgtgaatgtgtggaaatgtcatcatgaacccctctgtataatacattttagaaattaaatgagaaaattattgctaacattttccttgagagctatgtgttaagtcctgtgtggaatgagttccacatagtttctcatgtaaatcacacagtgaaaccatgaagtgaatttaattactacctctattctaaaactggaaaaacagatgagatatattaaatgggactggagagatggctcagcctttaaagactaggctcacaaccaaaaatataagagatatattaaatgattcatccagtggaatggatgcagtgagtgttagattcagatctgtctgactctagaggtagcaactatagacttccaccttcaaaactctacagtcatcaaagttcacatttaatgaaaagggtatgaacagggattgctccatattcttgtgttaagcactaaatgatttccctcttatatttatgacaagaggagcccaatgaaggaagccagcctattagctgagggagcaggagaggtgccatgcattccaagcatcttaattctggttttaattacttagaccaagcagaattattctatgtaacatgcaatttttgtatactttaaaaattaatggtgaatgtggttcagatttgagagaaactttacattcatgtggtagttttagaagtttttagagttaggctatttttttcaagtaaactggaatgactactgacagaaatcttgtgaggataatttggagagtttctgtctactctacctcattttgtttgtgtttaggccttatattagtgtctttgttactgttatgtttctgtgaagagacaccatgaccagggcaatgtataaaaattaatgattatcatggccagtagcatggtggctgataggcaggcatggtgctagagcaatagctgagagcttacttacatctgatccacagaaggaagcagggtaaaactggattattaagaatattcctgcagcaactatagtacttgaatgaaggagagctgagactcactcccagtcacacttccaaggccacacctcctaatccatcccaaacacctgtaattactctttttctgccatgacagccagctcccaaataatgacaccaagacttcttattaatgatgaaagctcagcctttgcttaggcttgttccactagcgattataagttaaatttgtttgatttgattttaatttatatttattttaatctacattctatcatatggctcaatatctcatgtctttgtactgcccaagttgcttcctctgtgtctggctgggaaatctgccttcttcctagagttctgtctctgtgtcaaagtcccatctatacctcctgcctagttaatgaccattcagctttttaattgtatcaaacacagcaatacacctttacacagtgaataaatatcctacaacacagtccctcaactgggaacctaaaattcaaatatacgagcctatgcatgccattgtcatttaaatgactacatttagcatgacacatttgtcacaatgagtgaattaatatagactcactactgttgctctgctttattcagattctttagcttttcctcagtatttctttttgtttcattatctcatctgagatacctcattgcatgtagctagcatgtttcccctggttcttctccattgtgacacaattccatatgcttccttatttttcctacagttttgaagactaataaagtgttttatagaatgatacagctactttctataacatgaatctcatgttcagactgggattcttagttcttgattctcaagtcttggaggaagaccatgaagatcaaattagcctcacgttttactcttttttgctaattttccctccaaattctctctccccataacatattaagtaaatttttacatttcataaatgtgcataatgttttggttactatctcccccactctcatcttccttcatttcggtgtcaaatcacctccctccactacctgttctttccccagtttaaagacatttgattttgttatgtgatctgttttgctcaatgagcaacatctatgtgaccatcagattagcactatccattgaagcttgatgggatcaccagtggatatgcaactgaaggcaatggcttttcctttccctgagtcagtccacaggaaatagctcatcactaaaaaaaggagtggagtggaggttccctgaatatcccctccattttcttatggctgttggtgggtctattcctgtgcagctgtatgttgcggctgagagtttgagatgacaataattgtatattttccagatggatttcacagatcttctccgtgtgttctagctcttacaatctttccacttccttttttgtggactttggaaataatggaaatttcccactgaaggaactcaggactctcaggagtgacatcctgagccttccctttcaagcaatagaatgcagtctggcacaaattgtcccctcaggtgaatagtggaaagaggatgctctagatgagtttgagagactcactcagtttgctgactcaaagccgttggtggccaagatctctagctatgtctggactggaaactcaacttggccaaaaatccatttatatgataccagtgatgagaagaaacttgatatcgggctagaattagttcgcaaaggatatacagtagaagttcctgaagatgtgaaagaagacgggactgtcacagatatgttgaaggacatggccactgaagcagatgcttctcttgccagcatactcaatgagaccaaagagagccctgaagagacagcacataccctatcctgcctcagcttatcagaaaaaactatatagtgttttcttatgtagcccaggcttcaaccgtgaagtgtttagaactaacttctcatcagttatcatttccattaaataaaatgattttgagtaagaaaaaaaagaaaagaactccttgtatttggtttgtaatgtattccatcatcctgtaagatgtgtctacacttggctgaacacttgtgaaaatgcttttgcaagcaacatttttattagctctttgaaaattgtatgcaatgtattttgagcatatgcactctcactgtccccaacctctcttcactctcaccaccctcctatcctatcgccaccaaactttgagatttttttcttctttttgaaatgtatttttacatcgagttcactttttgttgtacagttagtcttggaagtgggacctcccctggcatgtggttatctatgaggggttatatcattaaaacaagtagacttttcctctcccagtagcttttaaatgctagagctcatcatctagctgttggattttatgctctcctgtcccctctatgctgggattttgtctggctggagcttgtgcagatattgtgcatactgtcaaaattgttgggagttcatatgtgtaacatctctattgtctctagaaaacaccatttacttgatgttgatgtcatccaccaccttttacattacagtctttctgatccctctttggcaaagatccccaagatctctctctctctctctctctctctctctctctctctctctctctgtgtgtgtgtgtgtgtgtgtgtgtgtgtgtgtgtgtgtgtgtgcatgtgtgtgtgttcatgagtgtgtgcttgtgtatatgtgtgcaatatgtatgtcctatttaaggctgaacactccacaatctcttgttctctgaatgttgaccaattgggagggggtgccactgtatgtcatctattgcaataagaagctgctttgatgagggtttaaagatgctctgagctgtgcgcatggttcattagatttatattaataatgtgtcaatttagcaaataatagtattggggtctcctgtagagccaatgatccatctagtcacaggtttttggcctctgtaatgatgccaggtatataggttccatatcatgcagtaggtcttagataccatcagaaagtggttggttgctcccatatcattgatgcccctctcacaccagtgggtgtatcttgttcatatctagatgagactgagaactaattttctcctccagaagcaagcataacatcttccagcaccatgaaaatagttagtatggatgcagctttaagtgagcatcagcttgttatcttcaagggctcaagtatgtggtggtttgggtaataaaatcttaccatcaaattctggagggtaaccaagagcagtggcaatagactgtaatgtttgagggtctatatgatgctattgaccatcaatgcaaaagagggcagtccatttctgatagtggggcttttgtttgctagtatgaggtatctagttggggtagcttggtggctaggttggctggtcagcaagcttcaggggtttgtttgtcttcatttccccagtgctaggattcaaactgaccacagctcttttatgtgggttttgaagatcaaactcattcctcatgatttcttgacaagcacttgactgatgaggcatctccctagcccctccctttcatcttttccttccttctatcgaatcagcattgtcctgatctatcaacagcctgatgagagaaggatgtttgcttttagatgccaaacaatcacctgtctcaaaccctttgtagtcatctttggatattctgcttataggttctcaatatcaatatgttcattttttactttctttttattattattgttattgtttgttagagacagggtttctctaaatatctgtccaccctgtaacacactctgtagtccaggctggcctggaactcagagatatgcctggctctgccttccaagtactgggattaaaggcatacaccaccaccccatctttcactttctgtaggcctatgttcaaatcacctccccagagagacctttgtagggagacaccgtaaccacacctcctaagggatggctacaggtgtcctgataaagcatgtcaccggtataccacacaatcctacaggacaatcagtgtttgagagatctaataggacacttaaggagatgctccatagataggctggtaagtcaactccccccaaacatatgttgcataatgctttattgacactaaactttcttaatgccaatgaaaaaggacaaacagctacagaaaaacactggactatggaaaaaactgcttaactgcttaaccagtatacttcaaagatgtactaacctcagtatggaagcctgggcatgtgttacattggggtaggggttttgcatttgtttccacaggagaagaaaaactttggataccatcaaagttgatcaatattcgagttgaaaaagaaaaacatctcgacaaggatgagtgacaggtatttactgaggtatatctcataaactaaatagaaacctcccaaaagaaagggaagtgttttgcttctatcttcacaggaaaacttatctccaaaagcccaagaacactacatgggtagatgtttaagaagagaaggtagctataaccatcaaacaaaaggaacgtgccttatggcaaaatttatagctgtctctcaaataactatttctctttacttcctagtccctattcaagtaaatcaatgctggatttagagttggattttgttttcctcccctaaaatccaagcatgttgtttaactaaactttagaggtctgtattatatcaagaagccaattgatagtactactcagcagaaaaacaaaaacaaaaacaaaaacaaaaacaaaaacaaaaacaaaaacaaaaacaaaaacaaaaacaaaaacaaaaacaaaaacaaaaacaaaaacaaaaacaaaaacaaaaacaaaaacaaaaacaaaaacaaaaacaaaaacaaaaacaaaaacaaaaacaaaaacaaaaacaagatgttgctcagaatgttttccttccagatgatgactgagaagctaattaaaaaaatggtatcaggtaccacaagagtaacagaactgtgctgttttctgggattttgttttttactttttgtttttgttttttttgtttttttaaatggagtgtgctggatgtctctacaattttgttnnnnnnnnnnnnnnnnnnnnnnnnnnnnnnnnnnnnnnnnnnnnnnnnnnnnnnnnnnnnnnnnnnnnnnnnnnnnnnnnnnnnnnnnnnnnnnnnnnnnnnnnnnnnnnnnnnnnnnnnnnnnnnnnnnnnnnnnnnnnnnnnnnnnnnnnnnnnnnnnnnnnnnnnnnnnnnnnnnnnnnnnnnnnnnnnnnnnnnnnnnnnnnnnnnnnnnnnnnnnnnnnnnnnnnnnnnnnnnnnnnnnnnnnnnnnnnnnnnnnnnnnnnnnnnnnnnnnnnnnnnnnnnnnnnnnnnnnnnnnnnnnnnnnnnnnnnnnnnnnnnnnnnnnnnnnnnnnnnnnnnnnnnnnnaagagaagaatttgaggactgtctttgtctttcttggctctttccttcaaggtgtataccgtctcacaatcattatttttccacgattgccttttccagcatgtacacatatacaagcaaacatttctcggctaacacttatgtttgagtcccacacagcaaataaagagcagcctaacagcaatccctggatgctccagagaggaattgggccatacctcctcaactgcactggatccaacttactccatttcaactgacactctgaccagagcttcgagtaatgacttcaatcaagttgaagatttcaacctagatcttcaatcaagcaattcccatctaatatggaatggatataatctgttagagactttcactatactaacattttttcccccacaggaccccacaaggctactatcatcccatttcagcaggaagtaacttggaggatgctacgtccccaacccccattattgtctattagggtggtgtaagggttgggattggaaggaggtgttcaggtttggacacctctttcagatgactttagggtttagctgaaatagacatggttagaatgtgcaatagcagatttctggtatttcacctttatgattgttaattttggatactttacactgttaagttttaatcctcttttagactaaaaggagaattgtagggagacaccataaccactcctcagggctggctaaagttgtgcctgaccatgcctgtcagggcgtggtcaaggtgaggtcaggatgactcaggataggttcttaagcagcagcgagcacatgggaggccccttctctctggcctcactgctccactgccctgggcacactctggcttgtgtttggctggtgtttttctaataaaagtatatccttattgtaagctccctttgttccttgatagaccttctattttttttctccatttttaatttaaattagaaacaagattttttacgtatcaatcccagttccttctccctccccacctctcctgccccccactaacaccctacctatcccataccatttctgctccccagggagggagaggccttccatgggggctatcttcagagtctgtcatagcctttgcaatagggccttgccgccccccatgtgtctagactgagggagtatccctctatgtgaaatgggctcccaaagtccattcctatgctagtaataagtactgatctactacaagagactccatacatttcccaggcctcctcactcacacccagattcatggggtctggattagctccatgctggtttcccagtcatcagtctggggaccaagagcacccccttaatcaggtcagctgtctctgtgggtttcaccagcctggtcttgacccctttgcttatcacttgtcctctgcaactggattccagttcatttcagtgtttaactgtggttatctgcttctacttctatcagctactggatgagggctttaggatggcatataagttagttgtcaatctcattatcagaggaggacataaggtagcaggaaggttgtgtagggggaagaatagaggagagcaaaataagagataccataaaagagggagacattataggcataaagagaaatcaggcactagggaaatgtccaaagatctacaaggatgacaccaactagccatctaagcaacagtggggaggataccttaaatgccttcccctgagaccttctatcttacccctttgctttcattcttcctccctctcttcttcaattcaaaatatattcttctctcaacaatacaccctaaccagtttcccctcctttcacttcttccagctcccttatctcctctttcccccagatccactcttcatgtcaattacatcattttaactttttattattgatactttaagaggaaaggtcctaaaagatcagagattttgttctgtacattgctatatgtccttacaatactcctgtatatagtacacacttagtatttgttgagtgaatgaagtttgtagatagttgaacctgctgttttcagtggtaatattactggtaaccattatgatcatagtgtataacggttaattaagatttgattcagtaccaggtttattccttgcctcatgaagcagtcataaagacaaattaatgataaatgcctctttttgcccttctttagtcactttctcgagtctgacttttagacactgtctaaaaaatatttaataaactaaagggttttccctcaccaaataagaagctccattcattgaagttttataccagacagatcacacagttgtcattctttcctagttattcataaccatggagcatttttggtcagtggtttgatgcataaattctaagctcttttaactgctgctgtttacagtgttcaatataatttctggctagacattttacctccccttcctcctccccacccctgccgtttcaccccttctggtcatgttgtagtgctatatcaatagctgtccttcaagtttctctttgtgaaataataataaaaatacagcctgatcgtctcatatggtttctataaatgttaaaagacaattattcaaatgtattctaagcaatgggactttattataaaacatgcaaatatgcatttctttaaattcactttcatgtgtttcagaagaaaaacagtattttttcattagctctagaattggtggttacactagtttcttttgtgctagtgtggcagaaatacctggtagaaacaacttaaggaggcatttattttctttcactcataatcttagagtatttgtctagtggggaagacatggcaaaacagcttgtggtggtagcaggaacatgaggcagtgactgttcatgtcctagtgggcaaggaagtagggaatgtgctggaaccagggctgcctataacctacaaaggcttgtctacagtgacctcctttcctcagacccgacctcctaagtgtttcaaagcctccaaaaagagctgacaatttgatacacgatcatatttggggtacttcagactcccaccacaacagtggttaatgataggttgcagtactgtgctttttaagtgacggtttgcaggtggactcagtcagtgtttgcttcctcctggaaaactgctgggatcttactctgtatagaaaactataagcctgtgagccttggggctacttagctttttcattttgaaattacttcataattttgctcagatgttgaatacatatactctgccctagaaaatatagaagtaattgaaccaacattgtttggagatgctcatttggggactatactgagtcatgaaaatcttctgaagcaatcaaactgtgcaccaggcccgttgctttggtcttctattttgtttggatttgcagtgctggggatgcagcacaggacctttggatactaggcaagtgttctatcaaggagctgtacaacagcctaccacagatctttacaaagaaacccttgtataatgtaccagctacaaaaataaatttttgacatgtgaatttcatttgtactagctttttaaaattagtttttatattagtatagcagtgtttgtggctaacctggaatttttacaaaaaatgccattatcattttacaataaatatatagactatatgtttgctggaaaccaacatttgtgtgtatatataattcacttttatatgaataacccaaattcaaatggttgttttcctatgcatgatatttgtttactttctaaaaagactgtcaataaatttctaatcatttctcttctgtctttgagaaatatgtttttaaagtattgaaagacccctgccccttagccctttctttctcaagtttgtctcctcttcctcctggcggcggcttccccgatccccgcccccggtggccggtggccttccccctccacccgctgcannnnnnnnnnnnnnnnnnnnnnnnnnnnnnnnnnnnnnnnnnnnnnnnnnnnnnnnnnnnnnnnnnnnnnnnnnnnnnnnnnnnnnnnnnnnnnnnnnnnnnnnnnnnnnnnnnnnnnnnnnnnnnnnnnnnnnnnnnnnnnnnnnnnnnnnnnnnnnnnnnnnnnnnnnnnnnnnnnnnnnnnnnnnnnnnnnnnnnnnnnnnnnnnnnnnnnnnnnnnnnnnnnnnnnnnnnnnnnnnnnnnnnnnnnnnnnnnnnnnnnnnnnnnnnnnnnnnnnnnnnnnnnnnnnnnnnnnngacccctttcccttggctcggggcgcttagccacacagaagctaagtcgccccgggtacccgagtctccaataaagcctcttgcttttgcatccaagttcgtggcctcgctgattcctgggtgcgggtctccttctacgaaagtacctcttcgggggtctttcagtattaatataaaaaacatgactcttttatcttgaactcttctctttaacccatgttcattgatcaagattttttttttctgtattctacttggtatgtctgtttttgttgttgttgtagtggtggtggttacttctttattccttaaaatccttccactttttctttttgaacttggatgttttagtatgaaattaaaatagactttaatattaaaggtaggactatgggctgaaagatatatatatatatatcataatacaaagtgaaataatccagacagaaaaataacaataactttatgatctcatgatgggaaatatccttctgtgtgtgtttatgttattggttattggttgttgaataaagtactgttggccaataaagaagcaagttagccatgactaggagtcaaggagaattctgggaaatgtagaaaagagaagtctggtgatccaggcaggaagtgacatagcaggcagattcaaaattcaagcaaggacaagcaggaagtggttctctcttgctcttcttcctgctctaagctatggagccgccatgtgatcccaggaagaggacgccagcggaagacatcctggataagataagtcttataaaatatatagatttatgataattaagactgagctagcatataagaaatcctagtcaattggccagcagcattgtaaactaatataatactctatgtgttattttggccgtgcaagtggcaggtggcactcgggtggcttggcttaaagatttattgttacaatctcacattccacaagaagaaaaatgtatgaaatctaaaaaaaaaaaaaaagaaagaaaaagggtagagggtagaacagcatggccttgggtgattaatggtaaatggcaaatgggagatgttgatcaatgattatataactatagttagacaagagggatatagaaatatccataataaaaacatgcggagacaaaaagtagatacataatcacattaggttggtctgaagaatggagaggatgagagaatgatgctaatgatcatgaagtttgtgtgagagagatttcatgagtgagcatgtgcacatatgtgcaagtacgtgtgcaggcatgagggcattctcaggagtcattccttatgaattttcaccctgtgctatgcaagtgtctttccttgggacctatgactcactgattagggtaggctggctggtcactgagccccaagggttctcccatccctgctttcccagaaccggtactaaaggcatccaccactatattcggctttattcttttcattttgtggagggttccagggattggactctcaggtgcttgcttgcaaggccagcactttatggctaagacatttctcaaattcaaagtgtcatttttgagtgatgaaaatgttctgaaattggtcaaggttgttatctaaagtaaacaaactaaaatcttttgttttatgtatgaatggaagaagcagctgagaccatgtgttatcacctgtcaggtatccctcagtgaaaatcacataagagattctactgtcactgtgaaatgacctcattaattgcttttccagaacttagggaaaaaagggcttggtctaagagattttcaaacttttcctaaatctagctatcattattacattgtttggaaagacgtagaatatctacttcacctgccacagaagaggagtacaagaaaaactgtcatactgtggtttgaattgtgacagaaattatttcctgaagcatttttttttatttaccagtagaatcttctttctggtcatttactctagagcagtggttctcaacccctgagtcatgaccctttgctgggtcaaagactcttttacaggagtcacatatcagatatgctgcatatcagacatttgcattgtgattcatggcagtagcaaaattagagttatgaaataacaatgaggtaattttatggctgggtcacaatatgagtaactgcactaaagggtggcagcattacgaaggttgagaatcactgctccagagtaacttcactccctttaaacacttcagaccagggctgatcaagctgtatcacttcttatgagtgagcagtatatattgtgtcaagggtatctttgggtttcagctgatgcatcatggattctgggacttaaatacattccttcccaacattacattttttttttgatacaaccactaagaatggcaatcattgttctcattctttcaggagattctgctttagcacattaccacagttaattaccccatctttcatatgagtcatttgcatgttgccatcatggatatgctgccttgtctccagagctactctgaccaatgtggcttcaccttccagctagccaaagcctgtccattcttagttgatggacaaagaaaaactcaattcaccctttagcttcacttgtgcttaacacccttgggacccatttttaggagttcatccaagatggaaacacattgttgttttactggctttcttactcatatcccccacaaggggattatggtaacagctgtacatattactcttcagggaccatgctggctagttttatgtcagcttgacaaaactggagtcatctgagaggaaggaaccttaatgagaaaacactgccaggagacttagttcaggcaagcctataagcattttcttaatcagtgattgatgtgggaagggccagtccatggtgtgtggtgccatccctgggttcatggtcctgtgttctataagaaaacaggctgagcaagccacatggaacaagccagtaagcagctctccccttggtttctgcatcagcttctgcctccaggttcctgccctgttttgagttcttgccttagattctctcagtggactgtgattctggatacagtagccaaataaacccttttcaccaagttgttttggccatggttttcattacagcaatggtaaccctaactgagacagaaatctgatggccacttgtgccaaaattttactcttcacttgggctcatttcaggtgcctggcaggatttccatcttcagattgtgcccggccctttggtttccagaatttctagatcagattctactcagctctgcatgtagacatcttgattgtccactgaaagtatccagtgtgttttctcacactcagtctctgtgctctttctgcagctttagcagccggcatagcaacaccaccagccttatcactaggcccagatgaaccacaagcaagaatgtacaggatgcttaaaccatttgcaaaagaaattcagcaatttccagaataagctggctgctgattaatcttctaactacaaagtcaggatatttgcacaatagaaggaaaataagtctccaaaaagaatgccaaggcaactgtaaaattaccaatcataccagaccccagcaagtcagtgagaagttgcctctccatttggggagtctggtctcaagaacagtgctgtgttcattgtgccctatctcaagtcttgttgaaggcatgcctgcatgttcttcatattctcctctagtgtgattctatggtttctgtgacacaaaagcccatatccaaccacactgcttacaccacattgcatctctaccatgtctatgattgttctagttcttgtctgaacttctctgaggtgtctactgctggcctgatgggagtgggctttttactttaccaaaggaagttctgtagttttagtactaatgtttctgtagaggttcccattttggaaacctaaagagcttcaggtttttcctgaaaggaaaagagttcctgactgccaaacttccattcaaatagaatcactctgacagaccactgttctgtcaaggcttataggtgaccttgtggatggcaagggtcttgtttgtgaaacccatcttcctaagccattgcctaagaacctcctctcctgtgactcttgctaggagtgatggctaaataggcctttgtaatacctgggatgcttttatctttagaaataagaggagagctaaggatatttgaagttgacctgaactcaaaggtaataattaacccaatcaattcttacatttttaacctgattctagttcacgaagctgttcttctgttttgcttgtttgatttgtgctaattctatgatgtgcatcaattgatcacacacacacacacacacacacacacacacacacacacacacacacacgcgcgcgcgcacacacatatatatcatacgtatatatagtctttatatagtaaaagtatctatgattagtgggcttcttattttgttttcttaattaggaaatattaatactattaataatagatagtagttttgcacatcagttaatatataccacacattgagttatgtgtttcatatttgttatttgatctcactcacctcggcttattttttttaaaatcatcctatcactaggaaatattaatactgttaataatagatagtagttttacacatcagttaatatataccacacattgagttatgtgtttcatatttattatttgatctcactcacctcggcttattttttttaaaatcatcctatcaaacagaaagaattaatgagttaattggctttagggagttctacaacttacactttcatagaacatggcaatgctgagattcaaatcaaagtctatttacacaaaaattaagttaattaacactagaaacttaagaaaaacatcactaataaattaagtatgtaactttaggcataatttgttatattataaagtgtatttagatatattaatataaaacacattcaagtagtgaattctattgagaagaaaaggtaaaaagctctgccaaccactagagtatgaacaatgactaattttacatgatatatatacaacatatatttaaaagattattaagtctaagattttattctctcttctggaaacaatatagaaataaatcagtttctacacagatatctttttagttttctaaactggtaggtagagctttaagtaggtcacattttttgtaatatgactcataagtgagcaattcttaaggacattttaaatgtggcaattagacaacaactgtatgcaatgtggcaaacacacagtttaaaattccagcccacattttgaagtcctttagaaatttgatgtcattctctaagtcagaagggaaaagcctcagatttctccatttccgaaaccacataggaggcaatttactgtaagtgagcagtggggctcagacaactcaccagatatgtaacagtgaacagcacactgtggtcagtccacacgccaagtgacagccccactgtagctgcccagcgctggtctcacaataccaactacctaatttggctaaaaagcatttaagagttaatttgaactgacataaatatttgcacctaaaagcaggggcaggacatcagtttttttttaagcagctttcttgaattaagtaatgggaataaaaatatgtcaatatcttccttttggacaaagaaagaattattagctgaatgaagcaaaatttctaattttgatttaaaatgctcatcctaatacaggcaaatgtcagctactcaatcatattagctggttataaataatcaaaaaatggtttctacttatttagaaacaatattgctttctcgattttgtgatattttcagtaattcaattagttgcttgtgggtttatttatttacttaattttatttatttattttttgtttttttactttttatatatttgaattacaaacaagattgaattacatgaccaggcctcccagggacatcaaccaaacaggaaatgctatgctactataagaccaggcacacagcatcacatcaaggctggatgaggcaacccagtagaagacaaagggtcccgtaaataggcaaaagagtcagagaccgcccctgccaccattgtcaggagtcccacaagaacaccaagttactcagcataacaactatgcagaggacctaggtcagatacctacaggttccctcatctctatgaacccccttgaatccttgtcagttgattctgtgggttgtgttttcatggtgtccttgacccctctggtgtggatttatgtcttccattctattttattgaccaatgtgtctgtttttatgccaaaaccatgtggtattaaaaataataataataataataataataataataataataatagtaataactatcctagctctgtagtagagcttgaaatcatggagggtgatgcctccagaagttattttattatataggattgttttaaccatcctgggtgtttttgtttttccatatgaagttgggtattgttctttcaaggtctgtaaagcattgtgttggaatttagatgtgtattgtattgaatcttcagattgctttttcataaaatggccatttttactatgttagtccaagtgattcataagcatgggagatctttccattttctgataccttcttcaatttcctttttcaaaaggaaactaaacaacagaaggtgaggaaatccaggtaatattatattatactttaaaagcctattcctcacctgattggaaaatctaaaacaaatggataattttcccaataagtacctcttgccaaagtaaaatcaagatcagataaacaatttaaatggacctaaaatgtctaaagaaatagaagcagtcattaaaagtctcacaaccataaaatacccagaaccagatgttttagtacagaattctaccagacatccaaagaagatctattgccaatactcctcaaattatttcacaaaatagaaacagaaggaacattgtcaaattcattttatgccaccacagtcatcctgatatctgaaccacacaaagatacaacaaagaaagagaattacagaccaatttccctcatgaacattgatgcaaaaatactccataaaatacttgcaaaccaggctgggcggtggtggcacacacctttagtcccagcactggggaggcagaggcaggtggatctctctgagttcaagaccagcctggtctataagagctagttccaggacagtctctaaagccgcagagaaatcctgtctcaaaaaacaaaaacaaaaacaaaacaaaagaaaaagactgatcactgggaatccagcatggaactaatctagaccccatgaatgtgggtgtcagtgaggaggcctcagaaatatatggggcctcttgtagtagatcagtacttattcctagcataggaatggaatttgggagcccatttcacacagagggatactccctcagcttagacacatggggagggcctaggccctattgcaaaggatatgacagactctgaagacccacccccatggaagaccttactttccctggggagcagaaatggtatgggataggtaggatgttagtggggggcaggagaggatgggagggagagggaactgggattgacatataaaacaatctggtttctaatttaaataaaagaatggaggaaaaaaccttgcaaaccaagtctaacaacacatcaaaaagattgtccactatgatcaagtaggcttcttcccagagatgcaagaatggttcaatatatgaaaatctgtcaaagaaatccatcataaaaagcacatgattatgtcattagatcctgaaaagcctttgacaaaacccaacaccccttcatcattgagtcttagagaaatcagggatacaagggtcatactgaaatataatgaaagcaatatacatcaagtctacagacaaatcaaattaaatggaggaaaactcaaagcaattccactaaaatcaggaggaaaaaaagacttccactctctccatacctactcaatatagtacttgaagttctagttagagcaataagacaaccaaaggagatcaaggggatatatgttagaaaagggagaagtcaaacttttgctatttgcagaagatttgctagtatgcataagtgaccccaagaattctatcagagaactcctacagccaataaacaccttcaacaaagtggctgggtacaagattaactcaaaaaaatcagtagtcctatatacaaatgacaaatgggcccagaaagaaacagggtaacagcactctttacaatagtcacaaataatataaaatatcctgggtaactttaatcaaccaagtgaaagacttgtatgattaaaaacttcaagtatttatttatttatttatttatttatttattaatctatctatctatctattctatttcaagacattctttttcaagacaggctttccttgtataacttactttgtagaccaggctggtcttgaattcagagatcctcctgcctctgccctccaagtgttgggattaaaggcgtgtaccaccactgcccagcttggtttatttttattttttgagattatgatataattccaacattttcccttccttttgttccttccaaatcctcccatatagccctctccccaaatccctttaaattcatggcttcttttttcactacttgttattacatgcacacacacacatatcatatatatatatatatatatatatatatatatatatatatgatccttttgatttttcgagacagggtttgtctgtgtagctttggagtctttcctggagctcacattttagaccaggctggcttcgaactcacacagatccatctgcctctgcctcctgagttctgggattaaaaacatgtgcctctacaatccgactttctgcccactttggcatgtccattagtgtcatccttgctcaggacgtgtgcctctactgtccgactttctgcccactttggcatgtccattagtgtcatccttgctcagctcatgtttagacagtcatgttggtaagacttcatggctgtagttctgatattacaatctcacagttaagtccctaatcctctggctcctgcaatctttctgccctctctttcacaatgttcccaagccatatatgtggaagtgttttttagatgtgtagattgagaccaggctcccaactttgaattttgatcagtggttgttttccatagtggtctccacctgttgcaaagtgaaaattcttgacggagatgaagtttatatttatttctgggtataaggacaaatatttactgattgttgggaggtattatgctggtttaaaactggtgttgtggactctcctccaataactattacttcacaaacacagagaaggttagctaggtttccaataccaggtgtgccttttctcttgttgagtgggtcttatgaacaaaacaatcccagacttacataataataattgttgaaaagagacaccatgaatttcaagttgagtggggaggagcatatggaagtgtttggatggagcaaagggaaaaaagaactgtaatcataatttcaaaattaaaatagcccaaaacgacaacaacaaaatgcagcaccctgcatgtattgatatttcaacatttcttccaacgaaattaactaatcccttacttctgagtttagctttattcaaattttaaagtctcaagctaatcaatcacaaattcagagtcataagctttctggtgcaatttccagtacagtcgttcccatcataatcctgtggagcaatctttaccacctgcacttcttggaggattctattattcagaacacatactggagcaacccataacctctgtttgcaacattcaaaggctgtagcctgccacaaccctaaacatatccaaatttctgcccaaagcctaagaaccacttggttcttatttattggcaaattgaatctgcatttgctgtgtattacatgattttaaaatttgtttgtctaatggaacttttaagtcaaactatttaacatatggattatttcatatacttctttgaggtaagaatatttaaagtctattctgtggattataaaggcaaacaatgaactgttattaattgtggtcttatgtatactataaataccctgcatttatttctattaacagaattttaaatattttgatcaaactgtcttatgtcctacctttccgaaatatttatcattccatttcctatttttgttaatttttaagctcttatgtgtatttaatatatatgataacaatatttataaccttatcaatcatctattatcaaccatttctttatctatatttatctatattctctctctattcatctatttctctttctattgtttgtatacgctatctgtcatctatatttctatatctatcatctctatgtatctttcatctatctcttatctatcatctttatttaagtatctatcatctatcatctgtctatcatgtttctatttatctgtactccatctactgacttatctatctatctatctatctatctatctatctatctatctatctatctatcatgtttccatttatctacattctatccatctatcatctatctatcatttatatttatgtataatatatctaacacttatttatttatctgtaatgataactctttctgccagccgcctgatttccgttgccatgttaggacccccaaataacatacagagacttatattaggtacaatgctgctggccaaatgactaggatttcttattttctagctctgtcttaagtatcaaccataaccattaatctacatattttataagaacttatcgaggactccagacaagtgtgtcctctcttcctggtgatcatatggagacttcctctttactacagttcccagaatcctcctcaactcctagcctcacctatattgcttccctattggccaacagtgctttatttatcaaccaataagacaaacatacacagaaggacttcccccatcttctcctcttttctgtctaaataaaagaagtgttttaacattaatatagtaaaatatataacaaaacagttatcaagtaagaactatattcaaggtatttagttcattcacatttagcaagatttaaagaaaatattctatcatctatcttatctttgtgagtctaaagtcttatatgtagcttatcttttataactaaagaaaactacaaccataattatctgtcttcaactccaccaaagaccacagaagggtaatatataaactctagatctgacagagacatcttgctacctggacagtcatccaaaattcctctgtacattggggcatatatcttcagcctataggccacagtgtgtctggcagacttctccatttcaggaagaacccttcaggactgtcttgttttgccagttcagcagtcactttcctgtgggtcttgcatgtccagtttaaaccttccagacaagagcagttccttgcccaaatggcttatcttgccatgttgaaggcaaacttcatattgagtttcttccatgcccatcctcctttctgatataattggtgtgtcaggagcagttgtgtctcatgacatgaaaacccctataccatttaaatgccatatactctgtaggtctttgaaaagtttgaagaatatctatccatttcaaatacatccctgtatacttaaaaatcctaactaacctaactgtaatttttgactattatacctgattatatacaatctgtatttaattattcattacatttgaaaagatctgtataaagacaataccaaacaagaagagatatttacataaaacaaaattaaccttaaatttgtatcaataaatgaaaatccataccaatgcaaattattcacttctatctcctattccccttttttcctttcaaaagagattggctgtgatcattaccatttataaccaaccccatttaaatgaaaacaaacatttataaacaatatttgggaatttgggcgtcgttcattctaaactgcttcctgctggttgggggtgatgtccataccatggggatcacgataaaacacagaaacatggccaggtccttgtttttgtagtctgtaagactgtatcatctcagctgttttagatgttggatcacctgggacactgcttcagggggtcttgcttcatcaaaccatattattctggaaggaatctatagctttacattttctgtggaaacacaagcaaaaactcttttcccaagtaacctgttcttatatttaaatttagaagtcaaagcatttttaaaatatataagttggattaatttagtagcacctttaattaaatgtattttagcagctgtagctctttcctcggcaatcaaacaatttaaagacaacaatatagcatacagtatccagactctctgtgggttttccatctttacatggcttatttatttatttatttatttatttatttatttttataactctatctcttttgcttttattttttccttttatgaggcagggtttctgggtataactttggctgcccttgaactcactctgtacaccagactggccttgaaatcacagaaatctgcttgcctctgcctcctgagtgctgggattaaaggcatgcaccaccacatcctggttactctctttttctttctttcttttaattattttattctgtttcttttctctcacaagcctttgtatattttttaaacactttgtaaacctttagaggttttactttttccctctgaatctgtcttttctgtgtatctttatctttttcttctagccatgagtcttttatctcctaaacagcattcctaaaactaaagccatggctgttttagttgctgtcatttcaagatggcgagggtatgtttaccgccagcactgagagttgtgctcactgccttggtctatgctgccatcaaggagtatgctgccagcttggagttgtggtcgctgccactgccagttgctcctacaaaccattcagttgttagcagggcctcttaaaagagccctgtgtccccaccccctatactgagtaagaaaacctcccttaagagagcctctcgagtctctgcttgtctctagcaaaaaggagaccacctgagaaaatgctgctaccaagaagtcatgcttgtctctgttcttttgcttctaaaatcctttttaaagcttttgtgaagtatttatgttcgtaaaaccacatgggtgccatttgtaatgataactctttctgccagcagcctgatttacacctccacgttagggcccccaaataacacacaaagacttattaggtataatgctgctggccaaatgactaggatttcttattttctagctcttcctaagtatcaaccataaccattaatctatatattttataagaatttattgaggactctggacaagtgtgtcctctcttcctgaggatcacgtggcaactctcctctttactacatttcccagaatcctcctcaactcctagtcccacttatcttgcttccctattggccaacagtgccttatttatcaaccaataagacaaacataaacagaaggacttcccccatcatttatctctttctttctctatgtctgtctatctatctatctatctatctatctatctatctatctatctatgtattatctttttatttatgtataaactctctatcagctatctactatcttagctcaagtgatactcaaattcttgtgccaggcatattttacttagcaaaacatttaaccacataaatgtcagaatttccttcttttgtgtatatctactatattttctttatttagtcaccagctgatggacacttagattgtttctttttttgagtttgctaaagaatgctgcagtaatcatgggagtacaggaatttcttcacactgatttcttttctatgaaataattatctatgtatttacatccttgaaaaacatttgttatttttcccttttgataatataatttcctataaatgtgaggcaataactctctgtttataatcacatttgccaaaagtaatgaccaaagaaattaagtaataatgcatggaccaaaagcacatacattttcaataatatacaaacatacactgtttaataatatacattttctaaatgctctttgcttgccaccatcataatacctttcatcacatcaatttaattttctgtactggcttatgcataaaagcataagataaatctacactactattgtaaatgatctgaaaatgaccagtgttttgatccatctaatttgaaatctatctatacttaggatattataaagaagagctatttgtgcctcctgttggtttgtggatagcacagaagaagcacccagtcatttacaatgatattctgggcacgaagaaagttataatcatttcacaaattggtggtcataatatacacagaacaaagatttctttagttcccaaaaatagctatcatatttgtccatgtgctcaaactggtagagaacacccagccctctacacatgcttcatggattttgtcatctgtttctgagatctagagtttaaaagtctagaaaatttggagtagaatcactgcaaagctattacatggtaaattgtggaaagttgagattttaaaaggaaagcctgtgactatccagtctgaagaagaaaaagtgaggtgtgatttattaactttactcaagtatggaattaatttttctgagaaaaagtatcgtctgttttccaaccacattataggaagaattattggaaagctttcagatttaagggagccaaaaataatttttttttactgtggaaaatgttgggtattagagttgttagtcaccccaatccatggcacccctcatcgaattctttcaagataaggttggagcttggcttcagagagagcatcataagctgttagggagatttgtgcccatcatttgtccttaccataaagacttggagaatttaaatgactgatgactagcaagctggacctagcacacatgtctgattgatatgaaagtgccctcttgaccaaaagatgtatgctttttcaatcttctctaatgtgttgatatgtttaagtggacaattaaattgattcagcatagccaatagtagtagtattttctcccccaaatattgtgtgttacaaagagataactcatttttggtcaactggtaaagtgtctcgtgtcttatcagaggctcttctggcatcatggttttctctaaggccaatgcagctaacttttatttctttaaacaattcacgtataacaatctacacagaccaaacaaatcaatttcctgcacatctctttggggtagaatattttgcctgaaaaatttatttctaagtatactgaataaaatctgttcagagcactaatataaaaatagcacaaagtctggaaatgatttaaacttctgccacaggatcaggaggccagaaatggaacagctgacaagttttacccaaagggaagagaatgtcttgtcttataagtgaaacaattaccttttttggtagcaataataccattttttagatttctttgtttggtgattataattctgttttcttcaaaaatttatcttaaaaatgttgtgtcccaaagagtgtgagaaaaataacactggagcttattgatattgatttatggataaatagtgaataacacattttgatgtcaattttgaatatggagacacagaaaactcaagtattagatagtcatttctgtccttagtagctaacaaaaaccacagagaaagaaacataggcacagctgtattttttaaaatgtatggaattgattaaagtcattgagttacaaaaccaacaaaactatacagaatggagaatgttgtggtgctgctccagatggccaatttgacttgacagagtcattttcatggtggaccagatgactttcagtaaaatattcatttacacagaagcattttggcaagtttcacaatatttactttaaatggacatgccctgagtctgtgaatcaggtttctaggagcacaaaaaaaatactaaaaccttccatcatgctatttatttagtgtcctgggtcaccagctttatagcattcttattttgtttgggagcttgagaaatggctcagagtttatgagcactggctcacaaagtttcataatttcaatttcaggggacctaatgctctctttggcctccaagagcactgtatacattcaagtaggcaaaacactcctgcatacaaaaatactaataagcaaatcttttaaaagtttgttaaactttatttgatataaggaagactatttttccagctctcagcaggcactccttagttgcttttagttctttgtctaggattcagaccttatgagttttcccctagcctgtttgttggtgtcattctggttcaggtttcatttgggcagtcatgttattgaggtttcacgggtgtagcttctctgacacttctaggagacaaaatcccagcatatttcctgtttctatggatctgatgctctttctcctcccacttctgctatgatccttaggtgtaggtgtgcaaatgtagatggattggccaccacactgtcacttgctctctgaattttgatgtgttgtggttttctgcattgttctccttgcatttctgcaaggagatatttctttgatgaggggtgtaatagcaaattgttagtcctgaaattatatatacacaagtaacattctatagtcggagcaggtgtatttatatatttagggtgcatgagaagggctggagagaggaaaggagaggggaaaacatgtaattccattttaatttaaaaatatttaaaaattcaaaaagaaattgtattttgttttagctattttattacaaattattattattattattattattattattattattattattgtgtgtgtgtgtgtgtaacatggagtgtatgtggagattcgaggacagtttgtgggagttgattctctcctttcactaagtggaacctcacactcaggtcagcaagcttggtgatggcacctttatttactgaggtgcctgcattttcaaataaatgtgttgaatcacagagtacctccaacttccagcactacatgctataataagcattttcagagatgctttcacgtgaccatccaatagattatctacatagtacttacacaatggaagtcatcagtgaagcaatattttagagcagctttattgagctataactcagggaccattagttcatcctttaaagtatatatcccagtgctttggaatattcagaatccaattatcactgctacaaaattgtagaacattttcacacctccagaagacttcttgcacctgtattttaccttcaattgcatcaactgaagctcttgccagttattcatgcaaagaaaaaaaagcttgtttgcaattcattgagtcttgaaataacttcattttacatatacaaacaaaacctgtgttcagaatggtttctgaattactaaatttttctggaatgcggctgccaagtatatttaagcttattatatttagccattatgcttagatgttcaatacaaagtccctgcaagaagcaggtgtgtgtctgaacatttacattttttttacttttattcatgtgtataagccatatgcatatgtgttcaggggctgcagaggccagaagagggcattggatgctctggagctggggttagaatctcaggtgattgttagcttcctaatgtggatgttagcatctgtgctctcatccttagaaggagcaacaagtgtccttaactcctgagccatctctctagccttcagatgagtgatttggtccctgtgtttaatcttcatgagttgattatgggtaggaacaggattctattattccttagtatagtcatagttgaggaatgagagcctttttcattttttgtgtgtgttgcaattaggattactgatttgtcaaaagttggtatgtgtatacatgatattttcaaagtacaagtgttcaaatgttttataaaaaggcagcactgaatcagatcaacccagagccagttacttatctaaaatagagaacaagtccatgagccacagatggcctgctcttgatagtttttaaaagtcacccagctccggggaaaacccagctgacctgagcaagtaggagctcatggaccacagtctgacagctggggaaccagcagaggacccaaccagaccccctgaacgtgagtgtcagttgggggccctgggtagtctagcttggggcctagtttgtgaactgggttttttggagccagttccctatggagggatactctcttagcctagatacacgggggagtgggagaggttttatgtcctgccgaaaatgatgtgacactttggaggccttccccattggaggcctcaccttccctgaggaatggatagggagtaggatagggggttggtggggggactgggagaatgtgaggaagagggaactgggattggtatgaaaaattagatcatttttaatttaaataaaaattaattaaaaaagagaaaaaaagtcagccagctccacaatgtaatggaccagattggccatacttatattcttttgtatacagtaatttaaagagatcttttttctaggtgatggcatggtgtgtacacatgtgtgtttgtgtgtgtgcacatgcatgcatgtgtgtgtgtgtgtgtgtgtgtgtgtgtgtgtgtgtgtttataaaacacgcagtggggatctgacaggtagtgccttttttgtctctgtaaattacatttgatgttgttaaagctttcttttccacctggaagcccgtagggaaatgcctttaaagaattaattagcctacactcttatttaaggagctaacatttgaaaactgtacaagaaactacataagaatttttattttgaagttaatctttggatatgtacttcatgagaaattcatattaaatcatttacacattcacaaaaagcaatattgacaaaaccctagtagaaaatagttatttatacttttatgaagcttgtcattaactaggatgcacataattttggttctgtgtactgtggtatgctttggagatgtcttactgccatacctccctgagtttggaagcgctcacctcttctcactctgcctttatgtctgtttagtctgttgctatagcagaatgtgcttcctaacacttggctggaagctcagacttgtgcagtgagtgatagacatgacaactttgcctcagccactggccaaagtaaagaccaatgtcagtgaatgggatgatcattatagtcttccccaaatcctgtgtgagctacatgttttccaagctgaaataaaaaggaaatctaagctggatcataaagccaaatatgttactcttagaaccaagaactagcgagctgacatctgattcgagagcacgtatgatggaggagaggaacttttatgattcatatttctcttgactaactgccaagtcttttgtgactgactgaccaaatgtcaaatatcctttggaggatttcttgatgttttcagtcaatctgcaaatctcattactcttctaacaatctttccagacttcttttgtatttgcttttctatttcctatgtggtttttgagaatgttctttacctaagacaccatttcaatgcatttatgtagccattagagacattttctttgaaatataatttcaattaaacatttataacttgatggtgacttcttaatttttcatccataattgttattagtacatacttatttgaattaataagcattcttagcatactgaatgaattctgtgggattatattgttgtgaactagatgaaacatgtgttttattctcagtacctttatggagaaaagttgtggtgaagtgttaggctttaggatctcagtggatttttaaaataattacaaaactcattaataataataaaagaaagtattgtacaatttatatatgcaatataccaatatatgattatctcatatatgtctgtcctgaatgcttgttccttcaaccttatattctagttgccacaggcacaaagatgtctgctgtattttcaaaggcttcgtagaaggataatagcaatgtctttttaagaccagagctcatgcttttcctcttatgtaacttgaattcctacttctgcaatgtaatttcccttttacaaattctgaatagagaccatctgctcaccatcttactctctttttatctttgccaaatgtcattggcagaaccatctcctctgccccttatctctcaagtctgacccttaaagagtcccactttatctttgtctgttgtagggcagagtgaacagcaatggcttctttatctcagcctcatcgaacacatcttcttttggctctctacatttagctcccaatcctgggctccacctattttcatgccatgatgtcaagctctgagctactttagagattcagaaagtggtaatagacaaagccaaccattcttgaggtagctagcctctttgttttagagattggagcctggagtcattagactatccacaggctcagtggccagtcagagtaagacatttctgaccactttcctcctaggataccttgcagctattatctttacttgcttcaggttttgagttgatgtctatgggcagcctgttgaggtatgattctcatgaaggtaaccactaaacagtatgtgtgtgcacttattttagagacactataatttttaagagttacctagagtaatgtcatgaagcaaagtttaaaagtgtgcttatattttgtacactagtggtcttactacatttatagcaaaggtaaaataaaatgaaagaaataaatacctttgttcttccatatatttgtgtgtgctttgttggctatgtttaataagcttttatgctcttttctgtctcttgtgtggaattgcccatagcaactaggacattaactaagttatcgagctctgtgacccttctgtattctgtccaggagacaattggtcatcttgtaaaattgtttggtgtttttacttaatgaagttcttaatatctttttttaggaaatgctgttagcagtagagaaattttggttttctttgtcattgtatcttaaactctgtgtggtcacattatttaatgggtaaatcttatgttagatttcaactacttctctcaccaaacaacttatgagatcatttgccaaatacaagggtgtgaaatatgagaatgtgggtttcttctttatcttctcttttcatgttgattttgttttatgatcaggtaagaatgacacagacaaggaataatgaaaaatataggaaatactatttcttaaacttttgaaaaggataaagtctgaaaattagtttaaacttgtgaaaaattggttgaggctgctttggaaaaaatgcatggcatgtagttactgtaatgaattagaatattcatattattagtgtctggggttcaaaataattaaggagaattagatcttgaatgaatattaccacaagactttgtaactcagagttcttagggtgaggtcactcttgcttgctttctactgcttcggtaaacaccatggccaaaagcaacttgggttgaaaactggcttatttgtttgatacattcaggtaacaatacatgatggaagacagctggggaacactccagcggggcaggaacttgaagtagaaatcatggaagaatgctgcttaatgacttgttctcatctctttcagctgcttcatttatgcagcttaggtttctcttccaaggagtggcactgcttacagtgggaagggtccatctacatcaagtagcaatcaagaaaaagtcttgaaaacatgtccatagtccaagctaataaaatcaatgcgtcagttgaggtttcttctttccaggtgtgtcaaacgccacacagtacacagccacatttggaaaggaaagcaatacacatttatttccccttatttgtactccccccttcaatagtaactgcatcaccatcaagggtatttctgggccacagaggaccagggactcattatagatagattggctagtgtgtgtgaatataaaattgaatttagtcctattttatccagattaagctcaagtctttgattcaccaaactgtttcattgggatgctagaaataaaaagtgtttgatgagattggtccttgaaggagtcttggagactgtctgttttcagcaacaggaataggccaacgtttgcctaggggttgacccacatcacttagcaagcacagctgagaattggcactcagctctttctggaccctgctgcctgctcttcctgtctcaccatgttgctctctgacaattggctattttctggacagctgcaacttcctttcttccaggcaaaaaggaataaaatctgcaccactatcaaacaaccaaactccccccaaaatattacattataaaacttcctcagtgtacacagatactagtacatactatgttaccacatgagcttcagtttaaagggcaatatttagttatgaacttcataactaaatgattttatttctcagtagtcaaagaaccgaaattattactgtatgcatatatacatatgtatatatacatatgtatatatatatcccactttttcagaattagttatctcttatatttagctaagatacctgttttgaaaagagtatctgttgtaaataaattattatacatacaaaattagatattgtggaataacttgaatactatgccaaatttgctttatagtcaaggctagggttacattgactatttgaggctattattttttaatttgtattgaaataagatgatatctctattggcaaaacacatatttgaaagagttgatatgcattgaggcttatgtgaattttacaattttgaattaaaaactttcaaatttgtttgtgtgtgtgtgtgtatgtgtgtgcatgtgtgtgtttacatgtaagaatacccatatacccatacatgtaccagtgcacatggagtctacaaaaagggcttcaaatcccctggagctggaattacaggaagtttcgagatgcctaatgtaggtgctgagatcagaaccatagtcccatggcaagggcagcaagctctccccccatttattgaaaatagctttttttttgtctcacataatacatcctggttacagttttccctccctctactcctgtcaacctcccctcccatctgtatctactccctttctgtctctcattagaagacaaacaggtttttaaaggataatagtaaaagaaaatgtaatataaaaagtaaaataaaaaggaatacattggaatagggcaaaacaaagagaagtgaaagagcccaagaacaggcacaagaaatagatatagaggcagagaccaactcatttgcatactcagaaatcccatagaaacactaaaccagaagtcataatgtacactctcaagaatactctttccattgtctcttctcagggttccatgcacatgaatgagaggattcaaagagacatcccatttggagctgtgtgttccaagatctcttattctctgcataatgtctgattgtgggtcacggtatttgttatcatcttcagcaagtgctcctaactactgaaccacctctccagatcccttatatggttgtaatgtttcagaatcttatacattatttaaataaacaatcatcacatcatcataataagacagtaatgagactttcaccttgtattagaaaataaaagatgtctttaaaatggaggaatcatgggatggagagacggctcaacaagtcaagctgcaccatgtcatgcaagtgtgaagacttgcaagtgtgaagacctggcaaatgtgaagacctgaggtgcttctctagaatccacatggagccaacagtgtacttctgtaattgcagaactccaatgaacaattcctgggggccatatcggccagctagatttgtttgggcattaatgaacaagagatcctatctcaaacagaaaccctaaggaaagaaaccccaagttgtcctctgacctccatatactcactcactcactcattcactcactcgctcactcacctgtgcttacactcattcacatcacacacacacacacacacacacacacacacacacacacacacacacacacacaccccacacacaaattttcatatgcactaaaatcaagaacacagacagcctttcattctgggtgttcatcatttagatatgtgtgagatatgtgcatgtctttagcttcagtattgtttataatagaaaaactggtttgaatcttaaatttttccacataatacactgtttaaatacattttcatattttccaaagagaaaacaatgcaaatattagagcattttgggtgatgtaaaaatcaccccaaattagcccgcctgcccagcaggtcaggtatagtcagtcgcctggagaaacagttaattctttaaggtcagatgctcatctaagagatctggagacagcagagcagaattccccaggctttcttttttcctttgaaatttgccctttgttgactcctttctctgtctcagagagaaaagaaaggctttgagatttgctgatggctctaccacagagaacccaacacaggggcagggaaaatgcaagacagtgcacctttttgtttccttttgttttgttgaactttttattccacaaacctgtttagtatgctgtgaaagagtagtctcaggacatggcccattgctcaatgcctttctacaaggctcttcagaagcctcttctggctttagagataagattaaaaattttagtttttctgtctggacttactagactggaagcaaggcaaatctcagtttgcattgattcatcaccagttcctgggtctgcgacattgcaggcacgaaagagtttatgcttagtactaacatatggatgcattagattgaacgcccactgatggtatgaccattccctgaatgatagacacttttgtcatctgttttcttgttgatggccattctgaccttagtgagacaggatcgcatgcagttttcatttgcatttccctgatggctgaagattttaaatgtctattggatgtttctatttgttttaatttgcctccttttgaagtttggggtgcttatgtttttgaattctttgtacatcctagatgttaatcctccctcagatatataaataacaaggaaattttttcccaatctgtaagctgtctcatcactcatctgtatcctttgttgtgcagaaactttttaatttcatacaattccatttgttaattcttgctattcttgctattatttcctaggctgtaggaattctcgaaggtgtttgtatctcaagagtttctttctttctttctttctttctttctttctttctttctttctttctttctttctttttttgtaagctatctcagcattttggcctgagcagtgaggtcttcactcttctggtattaagttgagaggccccagattatgtgtctttatcatgaggttactcaccttgcaaggtgcttcagtgcaaaacacttaataaaataggcttagcacctttcaccccaatggaaattttctcccactttatttttgcaacatgtttttgattcactttaattgttacatcattctgacctatgtgagagatattttcatatctgctttgcccttttgttaaagctccacgccagcttattttaattctatgtagagtctagcattggagccaacataaggtaagaattaatgcctatgatcaaattgaatggatgatggaaatatttgatcatgagcaatccttgtacaagagtatcagcatttgaaaacagttgtttaagtaacagtgggtctgaatgaaacaaatgggttatcaaagacaccttggctgttaagactagagaagaaaagttaccatttgaatggagaaaaacaaaagtacagatgttaataaaatcacactatgaattttattctttggaaaatatgttaaatggctacacatactttactgttttaatgattaattggggaatgcagtcttttattttttatttttcagaatttatatgtgaaccagacttttaatttgcttgggtcttaactgtttttttttaattagcttaatcatatattgcattaattaacatttgtaatttatgtttggattctgagactctcatcaaccaagagtctctggctcagagatgtttctgaagcctggggaagagctctgtagctgttttctgattgtttggtgaagatggacttgtacattatgctggtcagccatgttcctcggcaagggatagctcaaaagggagcctctgatggttttcatgagtccatggaacagccggctgcgagcagcagggcgaggctctgagagggctgtgcgtatggtttcctcgggataaaaggggtgtggactcccgccttcacaggacagaaacttggttcccaagttgaacaagaatctgtgaggtggtttacttcccaaactggccccagattcagttttcctggcatccctcaaccatggaatcctgtcttttggctcctggtgacaggcagcctgtcacctttggttctggtgtcatgtccaaggaaatgctctgtgccatagggcatggaaagacacagttagaacaggagaactgccaatggcagaggctccacaccaggatgagcgcaagggaagtggccgtaggccactgtggtcagcctgagcatgcttccctttcataacccagacttggatgactagatggtgcttatatttggctggctgtcctctggggacattttaaagtcctgccgcaggtctttcattggcacagtgacgctggtttagatccttggccaagctgcctttgagtttttatactaaggtaagccagccaacatttaaaccctgtttctgatgcctgcccttatgattaaagtaatgcaactcatacaggctcactagtcaccatgccgttacattataacagagcttctgcttaaaacttaaattcattctatgactcagatgtgtagtgtcttcagcaatggggcctttccatcaagttctagagagcagccaatggcattggcagtagctgtaatatttagggttctgtggcagttcactgaccaaaccctccaaaagacttaacccactgttggcactgggctatttacttgttagtttgtggcatctagcaggaccattgccactccattatcaggtaactcaaacttttaaacaaggaaaattgtccactgtttgtggtggtttcagaagaattacttgcagtttacctcaacagtcttggcagcttcattcactatgaataattgcagatgcataggacaccactaagattatatgcaaatattgctaaaagaaggcgctctagaaaacctccaagggttagcgtctatactacacaatctcttctccattttgatctctacctctctgtctccttacacacattcccccttcccttttcatcctgatcatattccctattgattttaaagggtattcttctaactttcatttggcaatcatcttaactcatatttcacaactatttcctagttatttactgttacaagatcagtttggagcccttctcacctcagatgcatgcagtcggccaggagcccaaagctatccccacttccattttgcccaggattgcaaagagctcacaccactagcctagattggttaggcttttgacaatacggtcctgttgtcttcagaacacaccaatagaaagattcacgtcatgattccttttggggctctgattaaaataagaaactgatttgaccttgttatttgccttcccttaaagtaaaaataccatagttaaaggaatgaaggaagatgagacgacaattaaaagaggagcaggctgtcaaagaactcattgtctcaaaggaagtagagatatacacacttgcacaagtgaaggctgagtttctgttctgcctggtccggatgctcttcagctccaaataaacacactgaggctatattaattagaatctgtttggccgaatgctcagtttttttactggctatttcgcccttaattattaacccatttctattaaactatgtattgccatgaggctgtggcttatctgtaatccagcaccttactccttcaggaacatggcatctcccttgcctcttctctctgcctctctttccagaattctccttgtctggtaaccctgcctatactttctgcctggccactggccaatcagcattttgttcatcaaacaataagagaaacatatatacaaaacaaacaaacaaacaaacaaacaaacaaaaaaacgcatcccccatcagagaaggggaaggcaaatctctgcaaaggtggcaggacaattatgcactttgcttgtggctgagggaggataggatttgctgctgaagtggcagctctagctacccttagagagttagaagtacactccccagtgaagaaaaatgtagagaaaatggtaaagtccaatagccattcaagcagaggaaggaagaaggttgcagaaaaatgttgttaagttatattattcattattttgaaatttccatgcaattgtaactccaaattagtcaagtaaaatctggactaacggctaagcagttcctgccacagatgaaaaagaacttggttaaacctcactgcttggtgacaagtaagggttatgaagtcaaattgtccgtattttaacccggctgcttcatttaccaacccctgatcttggcaagtaacttgacctcttgatactttagtcttcttcagtgaatggatggtataggagaacgtcacaggacttgtagtacaaattaatgtattttaaaaagtgttcacagaaagccttgtgcaagtgggggctgctgttgcccgggggtccaggtgcattgcatcttcaatgtttgaagtgtgctattcatgtaattcagtatgaaggttcgctagaagatatggcttaggtctgctacagtggtgaaatatgattttttcttatacatccatgtccagcacacagaatgacacaaaataactctgctggcattcctatgtgaaagtttataaccgagtaccacttaatgttattgggactatcttattttttattatatgagcaagattgttcaaccaagggacatcagaaataataaatagttttaaaactttagattggcccactggggtaaattgataaaacaatttaggatactccagttaccctcaagccctctaatgagttctggagcatttttgaaaaaataacctttgatactgaattgccacaaaacaaagccaatgttatcttgttataaatatgtacatacatttttcccactcttttatttcttaaaagtttgctctaataaaatttaattttgaagctttgccaaagaaaaaactacagatgggctatttttgttacaaatgataaaaacaaatatgttataatgttaagtcaactcactgttgtttctaaatactttgaaatattacaataacctccttaatgttattataatcatcttttaatcatcttatcaaaatagccttaggaactttttgaaactgttctgataaaaatatagaaacagtaataaaatgaaaatacaacacgaaatagtaatgcatttcagaaaatgtcgaagaatattgtgtcaaaaattgcttcatttttttgaaatgtggaatggtttaaaagctataattgacataaaaagtgggaaaaaggcaaagccatcaggattagttcaggaagtcatagattataataggcagaatgaactcaaaatattttcagtgtatgattcagagttttgagactcagaatcatgatgaccccatggtcacaagaagcctctgcccatgtcaacatatgtctatgtagtgcacattcaatgatttattctttatctcatttttaattatttccttcaagaaagtacatgtaaaatagaactgttgtttccacagaaccattcttccacgaacactcccgtagttgctgccaaatatttctgcaatagtttaaaatgtgtttcaccattcaccatctgctttttctctaatttttcaaaacatggaaatagctgaagataagggaaagttctctgaaatgccagactgtgctgtataaatataagttataatatatacagctatgtcttgggaatgcaaactactaatttgtaacattgaaaagagtagttgctattttaatagtaattgtggtttctagtacattaaagccagtggtaagaacaaatgttttcaaaaattataacttgagaaactcaaaaaaatcataacaacaacatcaacaacaaaaaaccaacaaaaacccccaaaaattcagtaccgaaacaatcaaacaaagataactggattaaaaaatgcctggcacactattgattgtgtgaattagtgaagacattatagaaaatagtatggagggtccgtgaaaattaacactagagctaatgtttgagctattaaccctactatgggtagatatccaaggaagtgaaatcagtttgttcaagaggttctacactcctgagcattaaaaataagtttgaggtcacactgaggcaacaactccagctgaagagtctggacaattcgagacttcactcaagatggtgtgtgtgctggaaagaggggacacacggagacaaggacatgactttattctaactcagggggcaactgcttctttctcacattggctggagtcccacatcacagtcttactcaattggctccttttaaaagaactggcacatgggaagtgaagggggaagggatcagccactttaattggagaatgtagtagggcctttgtgtaaacaaagggtgtactgggtggagagattaaagcacttgcataaaagtcttacaagatgagggagataaaaagatttaaattcctccctaagcacaagtttcaaagtatttgatagaagtttcatattcaatatttcttacacatgttcactgaaatgttacttttaatagccaagaaaacagaaaccaaaacctaaatatcatcagtgatgaaaggataagggaaaatgtagtacttattaacaacagagccgtatattcagccataaaatgacaaacgctttgttgtatgcagcattgtagattattgtactaatgaaagccagggacagaaagagcaatacaacatctcacatgtatggaacctgaaaatgttgactttcatataagaaagcagaatagtagttcccagagcctgaggagaggaataggagagggatgaggatggcctaatcaatgggtactgtgtcacagtcaggtagtcagaggatgatttcaggaaccatttcacaccatagtgactgtaggtaacagtaatgtacagtgcatttcaataaactagaaatggagaatttaaagaaacagtgtttgaggacataaatatgcccagtctcatttaaaacatgcaatatgtaaaatgcatcaaacatcatgtatgtggagccaaccaggatgtatgagttttatgtttccacccattagttaaaaaaacaagaaatgtaaataaaataaatgcaaagtgtagttttattaagagggtaaaatatttccaaggtaaatataatcgattttattcctatatagattagaacacacatttctatttctttagaacctgccactgtttagcatgctgaatctcttgctataatgtgatggtttatacacttcaaaactattatagcaagtgattaagcatgccttaggattctgtttaagcacagtgttccttctgggaaatgaggctggagtacatggacctacacagatattaatacatacatgtctgtactggtttgtgagtatttaagtaatgtgttggataaagagctctagtcttccaaattataatttcttttttaggtaatttccctttcattgctctggaatttcctaaaggtggcttcatttggcactacaccttttgtaacttgcctctgcttgccatgatgttcttctccggcattagatcacggccttgcttactctgaagacaacaatactgccctttcttagaactccctcccatccctttgttcttctccggcattagatcagggccttgcttactctgaagacaacaatactgccctttcttagaactccctgcctgtctacctcaaatctaagatggttcaaggtgatttcatgtaaggtgatctcttttatctgacaggaacacattcttccattactggtgtgtgtgtgtgtgtgtgtgtgtgtgtgtgtgtgtgtgtgtgtgtgtgtgtgtgtatgtgtgctctttgtttgaaatcagaggggtagttattaatcttcagaaggcttgatttaaagaaattcatcctatttcgaagttacctcctttgggtaggtacaatagggtaatatcagttttacctagagtctttttaaattctagcttttattccttactgaaaaatgtatctattagctcatcagctactcatcaagatgtcctcacaaaggtcgtgctaaatgtctcatatgcatgtttaaatgtcaagagaagaggagaaccccagcataataccatccacgacagggaagctaaagagaatatctttatatttttcaggtagtaaatattacttaagcaatgtacacatattgttagccaaaagaaaaaaattgaagtcaagaattctgtctattcggcagcccacagattgggaaaagatcttcacctcatcagacagatggctgatttcaaaaatatacaaagaactcaagaagctagtcatgaaaacaccaaataattcaactaaaaagtgatgtgcagaactaaacagagaattctcaaaagaggaatctaaaatggctgaaagacatttaagtgctcaaattccttagccatcaaggacatgcaaatcaaaacaactctgagatatcatcttacacctgtcagaatggctaaaatcaaaaacaccaatgacagtctatgctggaaaggatgtggagaaaggggaatgcttctccattgctggtgggagtgcaaacttgtacagccactttggaaatcagtatggtgttttctcaggaaaatgggaaccagtctacctcaagacccatcaattccactcttaggcatatacccaaaaaaagcacattcatactacaaggacatctgttcaactatgtttatagcagcattatttgtaatagcaaggacctcgaagcaggttagctgcccttcaactgaagaatatctatatctatatctatatatatatagatatagatagaagatatagagatatagatagaagaatatagataggatagagaaaatgtggtacatttacacaatggagtactaccaagcagggaaaaaaacaacggaatcttgaaatttgcaggcaaatggacggaactagaagaaaccatcctaagtgaggtaactctgtcatagaaagacaaacatggtatgtactcactcatatctggattctagacatagtgaaaaggattaccagcctacaatccacacctccagagaagctaggaacaaggaggaccataagagagacatacacggttccccagtgaagcagaaagggacaagaactccagaacaaatggggagtatggggtgagggggagggatgtaggagaaagaggaggggagaaaaggagggggggaggagagcatgagggatcaggaagattgagcagtggagacaaatagaggagagcaagaaaagagacacatcaatagagggagccactataggtttaaagagaaatccggcacttgggaattatacagagatccaaaaggatgaccccaactaggaccctaagcaatataggagaagctaccttaaatacctgtcccctataatgagaatgatgactacctaaaatgccatcatagagccttcattcagtagctgatggaagcagaaacaaagatccacagctaagcactgagcccaactcctggaatccagtttcagagagggaggagtgaccaacaaaggggtcaagaccactctgggaaaacccacagaaacaactgacctgagcaagtgggaactcatggaccccagtctgacagctctggaaccaacataggatcaaaccaggccccctgaaagtgggtatcatttaggatcactgggtagacgatggggcctctggcagtggaaccaggatgtatccctaatgcaccaatggatttcaggagcccatttcccgtgcagggacactctcttagcctagatacacagggagggcctacgccctaccccaaatgacttgacagattttaatgatccctcatgaaagacctcaccctccctggggagtggatgggggatgggatgggggaatctttgggggttatgggaggatgggagggaaggggaactgggattgacatgtaaaataagactgtttctaatttaaataaaatttacataaaaagaatgctgtttattggttaacagtgagagactatgtgggagactgatgtgtttgtaaaactgatcagcatataaaatgaaagccttttatccagaataaataaaatgcttggaagtaaatgtgaacaaatagacaaaacagcagaaaaaataagccttagtagatggtagtcaatccattcataaatctatgaaaaagttctctaatatatttagttgcccgggaaattgtaaattaaaacccaaatgaaatgccattccataccaattgattggctaaagtgactgtgccaagtgttggggaagaagtagaaagcctaggccccttctccgttactgaaagaagttgtaaattgctaatgacttcccaagttacttgttaggatttagtaatactgaccatatacatattctctgacctaataactgtgaaaattcatcatacattgccaagaggaaagtacaaaaatatttctagcagtcctatttatagtaaacattgtcagcagttgccaggaccaccccagagttggcgattcacagacatactctcaagatccaacatgattagtgctatgttccttggtatggcttatcttagtgaaaatatacacaactgaagcagcacaaggaaaatgacttcaggggcaaagtcaggagacaaatttcatatccccagagtccttttcaagtggaaaagagcagaacatgtaccgccaccatatgagagctgtctatcagggaaatatggcggagactcagtgtcaggtgtatttttccccttttattgaaaatagattttcccctcgcacaatagatcctaattgctgtttccccttcctctacttcagctgctcttcccctccctcctatccagatccactccatttctgactctcatcagaaaacaggcaggtttttaaagagataataacaaagtagagtatagcataataaaacaattagcacatctgaattggacaaaacaacagaaggaaatgagcccaaggaggtacataagaaacagagacacactcaggaatcccatcaaaacactaaactggaagccataatatatacacagaggacctgtgcaggccattgggccaaacattcaatttgaatgtcgttttatgttttatctcaatgaaaagtttacttatgagcatgtttatcttataaaaaaaagtaggtagaaaggagaaacatattacttaaaaatggttagaatttctaatagttttatgctattaaaatgaaatagtaaaattatgaacaatttagtgaatattatgtcagaaagtttactgagtgtgccattacagagctttgtactgtctacatggagacaccatatacaatttctactcagggcttgaaatgtggccatttcacactgatgcatcctgtatgtctattccatccgtagttgtcatagctgtgtgttctaagcacaaaatacaggccagtctcaggattctcaatatagacaatcacatcttttctcaacattgtattgttgcaggcacaacatgcactgctgagcacatttcaaatacattgtttaaagcagtctgtcttcattttaatataactacccaatattaaaactatatatgtggctcatatggcatttcatttagtggtagtttaaataaaaaaaatgaatagacatattttctatttgattagtttctaaaaaccaaactcttaatcaagttgttcttgctggtcctcaggcatccaattccataagccagtctagcatggcatctttagaactcctttggctctcaggtcctgttgcctgtttaaatgtttatatccactgacaaatagccatatgaatcacaagtgttaatgtcttattttcaattatcctgacttatggcaacatgtagactaaaaatattatttaatagaactatttaaaatattatcgttcctgggtcccagcctctaattaccgagaacacagtgaagacagtgagagcatgctaaaagggaactaactatacttgcacttgatataatgagcacaagcacttctgctgccagggctgttgtttctatgtgcttcccctccactgaaaatgtcttgttgggctttgggaaaagtttggaaacaaaatccaggatactagaaatctgtttattctgctatgttattgatgaatcagtatctgtagtcaacctcaccagttaggtcaaactaagtctcagtgtaagtcacaggtagaaagcacttcctccagtacttcatttccctttactccaggtgggactccgacaatcaattggcacaggtcagctcttttttagtttatttctccttatcatggcagtgtttccagactttcaaacaatgaaccactctctcaggcatgttcacttcagattctgctgcgggcacccatggaagaagtttgcttctggtttagttccatcgtgaactctgctctgagttgggattcagggtgtacgtgggcgattgctggcgtcccacattgagagctgggatactcagtcatcctttccatttccttgctgccaccagctcagtggttctattacactgctgttactgctggagctgttggcatcagtgcttacatttcccatgtcctggagtgacactgacgctatatgtataccaacacagcttggatctttaaccataaccctttcactgcaatattcatgctaggggctctgaggacatttttggacaggcacaatgatacttagacctgccctctcttccagctgataatcatatcctttaactacatttaagtcccctcacagttctcctccattacagaccagctcgtttttataaagctcttgttagcaccaccagacaaaacagaaattccagttaaattttaactttaaaaacaccatcttagtcaactctaacaaaaatattatagatgagtagcttaaaaaccatggaaatttccttctcaggctggggagataatgaaatgcttgctatacaaccatggtaacttgaggtcaatcccaggacccacataaaggtcaggcttgccagtgaatgcttgttaccccagatcttgggagacaggcaaaggaagacacctgggactttctcgacaaagagtttagcctaaatagcagcctccaggcaagcaggagatctttttcaaaaaaaaaaaaaaaagggtggatgtctcctgaggaatcagagggacagatgacctctggtctccacatgtatgcacacttaccagcacccatacctgcacaaatacccatatgaatacccccccaacacacacacaggaacaagcacacagaaacacccacaggaacaggcacctatgcatgtttacatttcatagttctttagagtaagatttagtgtctagcaagggttccttcctggtttatatttattcttagtggtgtgtgtgtgtgtgtgtgtgtgtgtgtgtgtctttaatgatataagataaaggtaatatttgtttctattgcatacgatattgagtttctctatcgccatttgttgaagattaggtttatcctgtttccagtacccttttcaaggaagaatcaatcatatattcagttttatttactgacgccaatgatataccattgttatatataccatttgttatagttttgtaattttttgtttgtttgtttttcaaggcagggtttctctgtggctttggaggctgtcctggaactaactcttgtagatcgggctggcctcaaactcacagagatccccctgcctctgcctcccgagtgctgggactaaaggcatgcaccaccaccgaccggctatggttttgtaatttgtgcaatcagaaagtatgaagtcttcaactttgttcttcttgaattaattcagctgtttgggtttctttgtgctttcatataaattataggattttttttgtcattgagattttgatgagaatttaaactgtgactgattgaagctgtatgaacattttaacaattttagtcctttaaatccacaaatagagatgtcttcctatatatttgtgctcacttaattttcttcactcatacctcacccataatttttggagttaaaaaaattcatctttgatgggcatggtggcacacaactttaatcccagcacttgggaggcagagacaggaagatctctgagtttgaagccagcctggaatacaaagtgagttccaggacagccaaggacacacagagaaagcctgtctggaataaccaaaaattaaaaccaagaaaaataacacacatccttggttaagattatttctaagactttctactcttccatgagaatgaacatggaattatttcccagctttttagaattctcccctggcagtgatagaaagacagttgatttttgtcaagtcttatatcctgaaactttactggtttaaaaaattacttctatttctagtttcattctcttgttatacaaacagacactatgatcttttaaaagctgccgaggggaggtaaggatttatttggcttatacttccaggtcagtcaatcattaagggcagctggggtgggaattcaagcagtaacttgaagtaaaaatcatggaggaactctgctgtttggcttgctttcttatggagcctagagccacctgctcaggaaatggtgtgacccatacttgagctggtcccccctacatgaaataagggaattaaaacaataccccaaagacatgctcataggccaatctgatctggacaattcttcattcaagtctttccttgcagaaaattctagcctcaaggtgacagctaaagttaagtaggatggtgagctctttagaggatagaaattttctctctatataaggtcacatcatcgttaataacagtaaaagataacttcaccttcttccattccaatttggatgtctctaattgttttccttgtctaattgctccactaaggactctggtgctatactgaatgaaagtggcagccatgtgtatttgtgtcttgcttctgattggagggaaaagctgtcagtttcactacctagtaagatgttgggtatcagttaggaggcatgggcaatctatggggactctggtactggatcagtatttaaccctagtataccaatggatttggggagcccattccacatagagggatactttctcagcccagacaaacgggggagggtctagaccctgctccaaatgatatgatagactttgatgaccccccatggaaggcctcagtctccctggggagcagaaatggaatgggataggggggcagaggaggggagggagagagaactgggattgacatgtaaaacaagcttgtttctaatttaaatttaaaaagaagaaaaaatgtgtgaaccattttaaaaaaggttttagctatggggttttggtatatggctttgcttatggtgagataagtttaagtgcttttattatttaaatgtaattaattttattaagcaccttatctgcatctatttcaatgattctgtgatttttttcttttgttctatttattgggtgacttggattgattatttgcacgtttaatcttagttgtcttcattgttccctaaacaatttagtgtaaacaattttgttttatacagattctttttatatccacaagaagaagagcatttatttcataagaaagctccctcacctaccaccctctctgctgcctttctctggcatttcttttctttgttttatctcattcttactgctgatacatttttttccctcagaaggatcaaatatcataacagtcttaaaaatgatctttttactgttgtgaaattcacatataaagtgtttattgtttatgaacattcaaccacatgcatgaatgtatgtgcacacacatgtgtgcaaacatgcatatacatttatttctcttagtttctcatgggctcatattcccaaggtaaatgaacccacatcattaggacccaggaggtgaaccaagactcgtaacaactcaggccctcttcctgtactcaccttcagtcagcatcttttatttcctcttttatttcctgtgttaagcataggaaaattttaaaccatagaagattaattattcactttatataatttgaaatatatagtataaaacaaactaattttgtttttttttgttcaacactatatttgaatgttttcatcattgtgtcattatagaccatttatcattgttgctgtgtgattataataaccacacatttatccattatgctgttgccccatatttgagtagttgccatttttctcttttaggactagttctggagtgaatactcttattcatgactttcatgagcaaacagacagattaattacagtcaaattaggtttgtctaattctctggcttatttttggtcttttgttgactagcttggtctaatgtttatcaagactctatgaatgaaaagaatgatatgccttttgaattgcaatgaatgatggacttggcaagtgtctgtcagatataagtttcataaaatattgctccagcacatgattttgcgactaaatcttgtacatgaggtaaattgggagaggaaatatgtttggaattttaaaaatgccttttaaaatatggttttactcagtaattactttagcagataatttaaagaaatttattgtgatgaatacaagacattaagatattttgctataaagttgttttagataggtatataattttagctggtttggctttgataaaaatagatatttgacctttttaattgaaacttagaatttacttatttataacacttggttattacccatgaaatattctgcaatacctcctggggatactataatgagtaaatgagaagttttcaacccagcagtctaggctggattcatgtgaatgtagctcacaggagcaaagtgacctattctggttctaagatctgtttctcatgtgctcagtgatgcctcttcattctgcctgtaacagaattctacagctgggattctgagaggctgtctcctggattcaagtgatttcctttcctcaactacgaacagagatgccccttctgagaaggaaagcaaacaggtttgccttggccaaagccccatggcccagagtcaagcccttaagtgctttttcaagtgcctagactagtttctttgaggaccagtcaaggtagcctaagaaggaaattacccaatcatttctgttctggcatccattagtacacatctgtttctttcagttctgtaggagaatggatctgaactggccacttccccggatatgagatgaggatacatctagtatgagatagaaaataatttccctatcctacaaagagttggagactgtattataaaaaatcatgcctaataacagtttatttgttaaatcttgctcatatatgctgtatagtatttctaatgacatttacacaagtagaaagcttgaaacttgggcatttgttctaggttttctcaatatgtggaccatgccctggtcctgtagaatctgagtctgttgaaggggcctaaccattgtcacttctttcagttattccagatgactccagagtaaactaacactcaatgtctatatggcctcatccttagatcatgccttgctgaactggctgttagcactcatttgagaataaaagaaacattagcaataaaatgttaaatgactggtgtgaattcaaatataaatgctcttagcttcagagacaaagtaactgtggagttcaggcatcattagtttctcaaattttagtgtcactctgataactctaacacacacaattttgcaccagattggcacagattttggtgtgataagtatgcaagagccaatgggcttttcttaggtatgtagtaacaatggaaatatttatctgcaagagtgaagaagaggccctgtctgaacaccacgtgggttacatttcttgattctttactttgtggtgagtatactgtaaggcttggacacatggcttcagtgttaatgttagtgtgcctggttttcccctttatcctttgtttccagcagcctcacactttgtctgacccctcagggtttaagtttctatgtctcagcaagtaacaacatcttaatcatattctgagtagcaccctccccccagttttatcactattcctagatactattcttaatgctttttcccacttaaaaaaattagaatagtattcctattttcttcaacaaaagccctgaatataagaacatttgatcattgcaaacagcgttttgcttacaaagttgtcttttctgccttttttttttgtttgtttgttttttgttttttgagacaggatttctctgtattgctttggaggttgtcctggaactcgttctgtaaaccaagctggcctcgaactcacagagatctgccgacctctacctcccaagtgctgggattaaaggtgttcactaccaacgcccggccttttctgccatttttcaaatacagtttggattgcacaccatgatgagtattgaagaatatctgttttctctttttttctttgtttttggaagattattttatccaaccagacagcctggacagtaatcacatacttgcttgctgacattttcttctctgattttgtcctctttctggtgttaattttgcaatttctgtatgttcaccttcactgttgaatggcatctcaggatctgcaatggtgatacacttttgagcataggcaatatatcgttgctaattctcagtgatgcttaggggttatagagtactgtatccctgatttcaagaccttgagaccaaagaggtgagaagctttgctcagggttatgctacaaggaagtggcaacattcacagttagagtttaaatttgcttgacttaaaaacttgtgatttcttagacttttaaaaattatattttaaaatggtttctcaatatatatgtacaatgttatggcttggtgctttttactttttgttttgttttcttgtttagtgtttgtgtttcaggtttttctttttaaaaattttagatcttcacaattctttaagaagtctactatggggtcagaggagaatgggagatggttcagtgattaacagcactggccactcctccaaaggacccaggttcaattcctagcacccacatggcagcttacaactgtctataacttcagttccagggtatctatcacatatatcagacaaacagataggcaaacccccaatgtacataaaaaataaatttaatgataagtctttatgccaaagctgcctgagttcagcctgtcatgttagggccccaaataatacagagacttatattaggtacaaatgctgcttggccaactgactaggatttcttacttgctagctcagtcttaaatattggatgctagctgctggcatcatctcttgccaggatcacatggcagctccagagtagagagcaggagaaagagaaaaaggaacgacttccttcttgcctgctatgtcacttcctgcctgtatcacaagacttccttttactacatttcccagaatcctccttgacttctagtcccacctatcttgctgcctcactggccaaacagtactttattcattaaccaataacataaatatacacagaaggacattccccatcaaataaatctttaaaaaaagaattctactatctgctctacgttgagggtactactcagtaagctcagtttcccctaacgatcttctactgtgatattaatcacattataatactttaatctacatactagatatggccattacaaggcagcaggaatctactttttttttcagttttaaattcttatttttttttttgctcctgaaaggggggggcattgaataaatgagttaagtgagtataacagtagccagtagaaattagtagcttgacccaaagctgtgaatccattgcagataaaagtatttagagaagggtggaaccctgggacatcattcaaatcaacccacatgactctgtacctagagtcccatttttcattttgcaagtgattatactaaagctgttacaattaattcaccttgctttgtccatttactaaaattgaggtcagagaatttcataattataaggctgtgccccttaaaaacagtttaataattgctcttctaacaagccagctcaataaatgagctacataagaaaagtgagcaaggatggaaggaagaagactccagtcccatacatggcacattagaccaacggtagagaagcggtgtctgtttcagaaactgttccaaattgggccacatgagaattctctagggaatctttgtttgagacacttaattgagtcagaaaacttcaggttctggtctcaggtctgctgttgactgtgtgtcagtaagaaagaagtttgcttgagcctcaatttgcccactattagagcaaaggtaagaaaatgtaattcatgggaagttcttgaagattttcataaaatcacataggaaaatagactcaggctgattctaaaagttgatgttaaaaagcatcagctaaaacaggtttcaagcaggagacactgaaagaagctctgtaaattatggctgtgataccaagagtacatttctccaaacaccaaaccagctggtatccccttatgttcactttggaatctcacctaggggggcttggctacacagtgcacccacttagcttgctctgccctgcttcttttgcttttaattgaaaaaggaaggataatttcaacttttgttgttaatttaataggtaatctatgactgcattataactacaggaaaagagattttaatacattttaatgagtcatcctataatatgacctcttagaaataaactctaatgaagaattttcaattcttcctagactattccctgtatttatactatattaatctatattatgatatactatatcttatttaatatgacatgaatattttccacaattacttaaatatagccataagtataggatggctatctcaattcgttatatgcaggtttcatgatattttccttcaagtcactaatgtcaaacatctaaatttctaccattttaacataaaatacaagtagtgaaaaacatatttatttgtatagtcattctttcttgaaggacaaatgataggggaagtatttctgtgtatgtttatcttattgattgtttaataaagttctgcttggccaatgaaacggcaagttaggcaggactaggagtgaaagaggattctgggaaatgtagtagaaaagtgatgatccaggcaggaagtgacatagcaaggagactcatatttaaagcaggataaacaggaagcatacctctttttcccctcctctcctgctccagcgacacaatgtgatccaccggcaaggagggacgccaataaggtgtccaataagataagtcttatagaatatatagatgtatgataattgagactgagctaacagatgagaatccttgaacaatggccaagcagcattgtacctaatacaagtttctgtgtattcatttgggccaaactcgggcaggtggctggtgaaaagctcacacatggcggtggggctcaggtggcttttggcagaaagatttattgtaacagacaaattcccacaggtactggaaaaaaataatatagacataaataatatatgtctatattatatacaaatattatttgtagaaagaagccttttgctattttacatattttatatcatcaaataaaagagatgcaaaataaatgtgttttccttttcatatctctgtttacactgtgtacaattttccaaaacatttttattgtaaaataagagctggagacaagacaaatacacataaaaatacatgtgcatctctgtatgcactgtttatgtaggcaattcttctttcattcggctttcaaggtgatcagttcagtgtagcaccactaggaaattacacatttaagcatgtttctgtgaaagttaaaatgatgcctctgatgtgtgaaaaatgtttgactttaaaattagtggtatttggcaatatattcataagtggtatttcaagatcatctagcctcatacttcaccgtttttaccttgaggtctgaaatcaggcagctctctgagaattactggattctttgaataagaaataggagctcagtgctacagcctgattaccacatcttatataatttgttttatcttttgtaaatgaaaacttgcattacaattttaatttattttaactttgcattttggacttagttttgtgtttggggagatattctcctctttgagttttacacacacacacacacacacacacacacacacacacacaatctatttatttatttggggtatttgtaattatttttaatataataatattaaattattgttgttagttttgcacatcattctattagagtttttaattatgattttagtaatacataggaaccattatttgtttaaatatgcaaattgaaattctgggtctacacatgtaatattaatagtgctaacatcgtggaagagggggcagaaatattctaagagccagggacagtagaggatagccaccaaatagtattttcagggtatgacagggacattgcacacatgaactcacagaagctgtgtctgtatgaacaagacctgcagaagatcaagccagcgaaaattacagtgtggcatggggagggtctcaggaaggctcatctctatctgtggaactatggcaattgatgactgctgaggagagataaattgttttgttttgttttttgtttcttctgataggctacccatgctctactggatgaccctatattcaggctgacagcactgagtggacttcagtgagtagaaaaagagtccatgaagttggcagtggaaagtatggggttggatatagaagagttggagaggagggagtggaggtggagctgatcaaaacacaatatacttacatgtggaaataacaataaattcaaataacaacagtgataatttcttttaacaatggaacatcttctactcatattaatttttaaggatttaaaggtttgagtgaatgaggggattggagagattgctcagaagttaagagtacataatattcttgcagaggtctgcagttcagtttccagcactggattgggtcgcttacaagcacctgtaactctagctctacaggatctgatgccctcctttgatgcctttgaggacacacacatataggtgcgcacacacacaaagacacacacacacacacacacacacacacacacacacacactgtcgtggcccagcatgtctcagcttaaacccatgacaaccatgaggttctacctgagtgggggtgtgtagacctgaaagctcctagcaaccaacagtcatcttgtcatcttcagagagctctcaggtctatgttgtagaactagagtcatttctttattagccatcttttctggtgtttcttaaccatcctgccatgaccacgagggaatcatctctctctttgttccctctctcctccggtcactcgacgcccctaactcctaaccttctgtcctcacaagttactcacacacctctagcacctctgtccaggtgagggcctattcagaagcttaggcacatacagatgcaaattaggagacatattaccctgagtccatggtaaacaatagtagccctactggcattaacaatataatagtgggccggagctttctggtgttcctgcttagtgaaaccaaaggctggatctcaaaatattccatagcggaaagattttggtcccccacaacacaccacatacatactacgccacagcacacacacacacatatacacataccacacacacaccacatacactcatacacacaccatacacatatacataccacacacactacatatacacaccacatacacacaccatatacacaccacaccacacacacacacacaacacacacatcacgcatacaccatacacacacaccacacacacacaccatacaccaccacaccataaccacacaacatacacagcacacaccacacacaacacccacacaccatatcatatacgcaccatacacacaccataccacacacacagtacacacagcacacacatacagcacacatacaccacactatacacataccacaccacacaaacacacacgtacaccacagacacaccatactacacacatacagcatatacgcacacacatacacacacatatacacacaccacattgcacacacacacatacaccataccacacaaacacaaacacacacacacaaacacacattaaaaagtggtcatttcaagaatgaattaatctttttttgtttttcatttattgttgcagaatttggtaggccttcttgataacatttaattaatatctgtacaaaataacaagcagtgaaattttggagacagcatgtcttcttaactaaaaataagaaggaaatggtgctctttcagttggtagtctctgcttctgcctaggaagcacatacaacagctttaagaagcctcacccctcagactttggagtccacagtagaaaaggaactgcccatggtcgccaaatagggattccttttccaaatgaagttccctaattagaaatctcccattgctaagggatgctaaggtcagcattagcagccttggtcttccaactgatcatagacaaatctgctagtggatatttcccaagaaatggagtgtttgcagattgcttggcatagattcctataaaggagaaagctcccgccccatccctttatgcttcgtttcctgcctgccaggctccaaggagacaaatgtttagatacagttgaaacatcaacagcagtttataccagtcttagtacaatacattatggagaacagacaatgttgcagtattgctcatttccctccagttagcaagatctttaacttcatccttgaaaacagaggactgccctatttccagacccatcttggtttttccttttccttttcacactttgaactgagctagtacccacgctgctgcaggtctggccaatcagaagctcactgtatttggattttcagttttctacttccattgggttcctctgtcttttacaaatgtaaaatattctaatcaagtataaacagatggaaaaaacaagactcattctgctcagtcaggggattgggttgctgatgtcattcctgtagtggtggccaagcagttctaaggagaataatcaatctagcagaccctgcttttcagttagaaacgaaaacatttgttgtaagctctcttatctcctccttttgttttctcctttgcccataggaagggaagaaatagaggcgaagagaaatctctgaaacagttgtatgctttctttgtgtgtcacaccacaggcatttctttccatcctcctgtctcatgccactggttaatacgaattttgcttgcaagactgttattctttatggacagataaagaatgacacagatttgtatttaacagtcccaaagctcttctcacaccagccttcctcttaattcaggcattgctgtcctgtttcacggctttgtctaggccctgtactctttatcttcacttaagcctgttaaaagtatccgacggagatccagcttccagccagcagcatgcctcagatgtcttataaatttgaatgcaaaatatgtgaagttgaattggggattcatagcagacacctgagcctcatgtcttactatttttatatgccactgtcataaaaagcttcatcagccaccaagcatcaaaactgagtttctaaggtgatttttgacttccctttcttggcgattctttctagtcaattagtagtcaaacaccattgctttgttctagattaaagggccagcatcccagaaagtcacatgctcttgttggttttgtggtgctaagggcagaatccagggccttgtggatgccaggcaagtgctttcctactgaggtgtcaccctggccccagccttgttttaatttaaaaccagaaaactcgagtttaatccctggattccacttcctgcctggagtgagtgagatctgctgctttaaatttccccgggtctcttgtgaaatggaggtaaacataatatagatctcaaaagaattgtggatttagaatagcatgttggaagacttctatagatgttaactgctgtctgttttttttttttttaaccattattgtcttcagtcacatggcccttgactttatttctgcctatgatattgagttgtttagtccgacttctgtctgcatctctgctcattccatttcaaatcctcagcagagtttctgccagttaaagacccaatcagagctgaataaagccacattaggcatttcaatatacaaaatcaaagatggaatgaccgtcatttattagaacacagaaaataacccagagaaggaaccagatgaacaacttatctctagagcagaagcaataaggcaggaggctgtggtgctcactaactgaagtaatcctataaagcaggagtcaaacttatgtgatatggctgggatgcccctggtacctccccaggaacagaagaagcctgggataggagggccaggtgaagttccaaaggtaaagttgtgttgacaaaatttgtaacaaatggaaaagaaggagctgtttttcaactccttattgttgcagttttcagattccagatttcagagaaccaactggtacaaaaatgtgatttgcagcacacctggtcataaagaagatgaactggatgaaacataagcagcacagcatcatctaaaacacagaacctctctgttgcctgaaaaatcaactgcctattcactgcttagatgataaagttcagatgcctcaaactttggacaaaaatctacttttccagttctttctcctaatcctttatttcctcaccattatccctaactgggagttccttgactttgcatgttttgattcattctcctgaaacgtttacttcctctagagttttactccatcgcctttttgttttctttattttttttttatttttttggttttcgaaacagggtttctctgtattgctttggaggctgccctggagctcctcttatagacaagtctgttctcgaactcacagagagctacttgcctctgcctcctgagtgctgggattaaaggcatgtgccaccaatgccctgccatatgaatgaaatcctcgttattcaagattcatctctactattctgttgaaattccaaggcaaaattaataacctgctgtggtagttacctttaaatttctcagacaacactctgtgaccaaagcagtttataaaaggaagtgtttaactgggggctcacagttccagagggatagaactcatgaccatcatggtgggaagcaagacagcaggcaagcatggtgctggaccagtagctgaaagcttatatcttgagataaagccatgaagcagaggagagagagagagagagagagagagagagagagagagagagagagagagagagaaccaactgggaataaatggatggcacgggctttagaaacttcacagcctgttcccagtgacacgcaataagaccacacctcctaaatccttcctcagacaatttcactaacagggacaaactattcaaatatgtgaagccatgggggggttcatcctcattcaaacaaccacatctgttcctctgtaagtctacaaccatttttttactcattcaaataaagtatgtatcggtctcttattatgtaagaaatgtgtgcaaagtactgcacatacaacaatgagcacagcattcttggtcgctgttaagttgaccaccctatgggacagaccctggaactggaatctgaggtaactagtggtaattagaaaggggaagatggattggagagtagcaataaatttggtcttagacaagttaaccttgctgtatttttttaagatatctaagaagagaacccagaaagctgtggtgcaaatgagtttagaagtctaaagtaatgagtgggtagagagatgtatttggaatctggatttacatttacattctaactgaagtgctggagagagagagagagagagagagagagagagagagagagagcatctatatgtgtttcttgtgtttgctgtctgcttctgttggtctatatggctctctctgtctctcactctgtgtgtctatttgtctatcttgattctttccccctttctgtctgtctctctatgtgtattgttgtcacatgacatagagtgcacttgtacatagaaaagcttgcagtaactgattttctctttcctgggttttgagcttacatcatcaggtgagactgctaatgcacttactctcagacattataagacaaaatgattttaatctacactggtgtttaacagtattgcatgttcttatttaagaactgctcacaaggaagttagctacactaacaaaaatataggcaatagataatcccacattatcaaaagccaaaaagggaaacacacacacacacacacacacacacacacacacacacacacacacacacacacacaccacccacaccaaaaccaaaatccaaaactagcaagaatcaactgttcattaatatcccttaatatcaatggccttaatttgcctataaaaagacacaggctaacagaatggatatgaagacagaatccatccttctgctgcatacaagaaacacatctcaacttcaaagacagacgttaccttggggtaaatatgtaagtgaccccaaaaattctactagggaacttgtacaactgataaacaccttaagtggcaggatacaagattatctcaaaaaagttagtagccctcctatatatatgtacaatcaatatagggaaagtggaactcttacccaaaacaatctacagattcagtgcaatcccccatcaaaatcccagtacaattcttcacagaccttgaaagaacaatactcaactttatatgaaaaaactaaagactcaggatagcccaaacaaccctgtacaacaaagaaactgctggaggcatcaccatccctgacttcaagctctactatatagctatattaatgaaaacagcttggtaatggcacaaaaacagacaggtagaccaatggtattgaattgaaaaccccgatattaatccacacacctatgaacacctgatttttgatgaagaagctaaaattatacaatggaaaacagaaaacatcttcaacaaatggtgctaacagctgcaagaccatgtctgcttgagctaatataaacgttgcaaagcacagatcacagtggctggtgtgtaataaacacaaaatcattgctctttcattaattcagatatttagcttttaaaaatgcattttcttggttaacaaagcagagatcagtaaagtcttcctatccctgtggaaaggaatttgctgcactgtgaaagtgatcggacagaggcaattaaaatccttgagtggaagaaagggagagtaagtaagacaacaatgccaccattctctttccacttcaaacatatgaacaacagcagaacacagaattccgaagaaggatgtctagttgttttagcttcgtattctatgatctaaaatgttgagctacaccagtggaatcctggaggcagagtcacagataaatctcagatatcctatccctttgcatactagcattctatgcccacagcacatataatccatccaatgtactacagacacattaaaaataatctaaagattaaaactggaaaacaaaatgagtttatggagagatattttggtgtgccaaattaaatttgaaaatgcgattgattaaacaatttgaaaataattctggcaatgcaactaatactgaaacacaagtaggcctaacactgaattagtcaaggagttagacacacaaactcattgagaattagttgctgcaaccagtcctcagcccaaggcaagtctgagaagtctgagaccaggagtagcaaggcactcaatgtgttcctattcatataacaaacaccttacctagagcctggcttggagaataaagcactgctgctcttccttttcacatgttaaagacctgaattcctccaagaagcatcatatttgactaagttattggaactctgttctttattttcagtccccgaactgtattctaacttttgcagcatggcatttctgagtcaaataggagacattccacttttattgaacttcctcctcacttgttacccatcaatcatgttttagactgcagggtcaccagcttttctctctgtgacattgaaaatgtggaatgtttaaagcaagaaaacaactacatccttgtaacaaagatcgggccataaagcaaattataatgggcaaaatcattagctgtttaatactgattgcttattctacataacttataaaaagtgacaaatggtgctttgttctctcaacttgctgatacactgcaagttggatattcctttatgtctagttcagcagtttcagaaacactgaaacattctgcatacagctgtgttcccacttgcacagacgaaacatctgccaaagcaaatactggtctctccctgtaattctaccactccaccagaatttctcctgtatttataggatgggcgtgctgattataagctggagttctggtgtttggttctcaactacattgtacttaagttcgttctatgtgtttttggttagaacttgaaagcaatgccacttttagatttgggagggtgcaaagaaatacagccagacaattacattatgttcatggtatatcctcattatgtgtctttggaccacatatatgtttgaagtgctcagtatttctctcctttccaaaatataaatttaaaaactctatcacagatttatattttgtatgcaacagtgtatagtacaaaaaatgaatcttgttcttaccattttaatgtatttgtgccatagaaaaacatacattgatgaaaaagggtttaaaagacatcagtcatgatactactccgggaaattggcttattaagtttaactccttttaagaatgaagagttgctctgaatatttttcagtttaacagggagtgaaatgttaatgatggaaacttgggtgagagcagagtaccagattgattttgtgcatctgatctatacttgtccatacatccacacagtttgctcaattgataattatatcagggatgaccattatttccaataattgcattttatacttttctacagctctcaaaatgataacatgtatctattttagtttttacacccctactcatttttttaatgtagtaggaactttcttcaatatttacacacacattaaagagtcagatcaggaatatatcagtggaactagatatattctttgcagtggcacactgcattcaacagtggttatgaaataaggctttttaaattttacttttaattacatcatttctcccttcattttttcccttcaaaccctgtatataaaatatcttgatttttttcaaactcaagtcctctttttaaattaattgttgttacatatgtatatgtacatgtatacatacacaaactccgaaatacataaagtgccacctgctcattccatgttgcttgtatgatgtttgcagggatgaccatttggtattagataaccaattaggatgattttccctgggaagattatttctcccactgtcttgcatgtaggttttttttgtgtgtggttgaggctttctggtctttcccattcactttggcatgtctattgttgttggccttgttcagctcatgtttagcagtcacactgatgagattttaatgggtgtagcttcttgtcttagttagggttcctattgctgtgaagagacaccatgaccatagcaactcttataaaggaaaacatttaattgggatgggttacatttccagaagtttaatatattatcatcatggtgctatatggtggcatgcaggcagacatggtgctggagaaagaactgagattcctacatcttgactcacaggcaacaagaagttgtctgaaacactgggcatggattgagtatataccagagctaaaagcctacctccacagtgacttcctccaacaaggccatacatactacaataaagccatatctcctaatagtgccactcccaatgggcttatggggggcaattacattcaaactaccacatatctgatactgggaagaaacacattctaacaccaaactcctcactcctctggctcttacagtatttctgttccctcttccataatgatccttagccttaatacaggtatcctattatatagatgtatccattgggactttgctccacaactctgcattctgatttgttgtgattttctgcatctgttttgaatagaagtttccttgaagagggatgaaaatgacacttatctatgggtataagtcaaatatgttggtttagtaaagtggtggctgctgattctcgttcaagagctaagtttccagcaccaggcatggcttccctccttttgaggtaatcttaagtctaattagagaactctttgttaccaccaaagtaggcatgttactactacacccttaggactatcattctgtatggatcattgctatggctcacaggcaccatatttatgtaggattatcggttgttttcctcatttggaagttgacatggtgtttgcatgcaaaaatgtatacaaagcttcttgtaccacaggagcaggttttagggtttcagctcagggtcctctgaacccttgtgtgaagtacataatatctttagcaaatagggactcacattccacctctggtgggcaaccaagggcaatagcaatggcctgtaatgttttgtgagtctcttggacaaccacagaccaacaactcaaaagaggatttctcatacctagttttgggaattttgttttgtggcctttgactcttggagggagcattgccagcccagatgggaaaattgcctttgaaagatatatacactgacttatgtgtattatgaaaatggaattcattgtaaacatctaaaacacttactattaaaacaaacagctcttgatgactgatttctcagacatatcattaagggaggtttctgataaacggctttattcaatacatggcttccatttgtgaacaagtaatcctctcttgattgtcccttgtccttctatcaaaatttcttccctacattcaaggaaagatcactggatttcttcaaaaagtggtttcttttgctttgtgattccttggtgctatttgtactctatcaaggtaaagatgaacataaattcatttagcataccattttctaactcccacacagtatgtagaagtttctctaggtcctgtcttctagtacccagacagttaactcaatttctccagaaactgtttccacctcctattatattattgtaaactgagagttaattaaagaatttgacaagaatgtttgaattagtgttggattatcagtagccactgaaagaaatgtacatttgcaaattaaatactaatattaaaataataactagaaaggggtaggatataaagcaagataatatatgtcatttagccatgcaaacattccccttccctgaagtccttgacatcttactaatttagattgtcaattcttcacattatgagatggaaaaatccttggaaagggattggtgttataaatattagacaattactatacagggattggtgttataaatattagacaattactatacaggggttgctaatgaaatgactttctttaatattctgtgtttttccttctatgagtggaataaaaattgtaagatacttttaaaaatttgaaaaataaatactgtagtaaaaataaagttaagagatgaatattcttggatcatgaaatagatcagtatttgtcaagcagtatcaaacttttggagttcttcaaaatgttgtaattattaaggatcctaaataaatttgggggatcatatcaattgatactaactatggtctcactctgagttttaagttattaattaatttaaaataataataacataacaattacatattgatataaatgacattgttttatgaaactaaaatttaattagaagagaaatattacatttttaaagaaatcagtttaatatttcatttaatagaatacagcagaatttttatatttacatctgatttcgatctattgccatatgtcgttatggttaaagtatctgaaaaattctggcttcatacagacacacagttaaaaaagagaaaaatctctcccatgaaatctctcccttcatggctcaggggatcctagggaagaggaggtaaaaggagtgttagagtcagaggaaatggaggacactaggagaacagggtcctctaaatcaacaaatcaatggacatatgaacttcagagaatgagggagtgtgggtaggacctacacaggtctgcaccacaaggggccctagatctgaaaggagacatggacacatggtcctacccttaacccagaagcaatctccaactgattgccacttgtaaatgaaaacttagttttctctaagaaatgttactgggaaaacaaattacacctaaggttagacaacagcatctttggaggttccttgtctcataatgtcttgtcaagggtttttcttctttttaaaaagtttattcttaaaaatactttatatatgttataattttacacacacacacacacacacacacacacacacacacacacacacacgctaccctagaggtcttctgttgagtgtttttatgggatttctgaatgtgcaaattagtgggtctattgtgccttctcttgggctctttttcttatgtttattttatcttatttcaatgttagcatttgttttctcttatagtttattgtgttactatcctttagatgcatctccttctaatgagagacagaaagggagtagatctggatcagggggagaggaggaagacctgagaggattagatggagggaaaactgtaatcagaatatattatgtgaaaagagctattttcagtaaaagtaaataaaataaaaaaaggaaaaatttcacagacttatactgtttcctttcctcatagaaaatttgggagttcccaagtgtatttattctgtctgggatttagaggaagaaacagatgtcaggtctgggattaagttctacatgactcactcatatatttttgcatgtgatttaatatctcttaatcaaatgttaattatctgtaaaatgtgtctctacctcattgtgtggttgagaaaaatcaatgagatattgttgtaaaaatcgtctttgacatcaaaacagaggggatgtaacaggcatttttaaactacaaattcagaaagttctcttaataggaatgatatttcggatacttatggtcataaatggtaaaatatcaagagtttgattctatatatggtatttaagaaactgtaaagtttgttttatgtagcctctgtcactttctctcaatcaatgtttttaagtcaatgctcaaacgaagtcagggagtttggagtaaactggcaaatcaaccagcattgcatcacttactaccatcctcattttacctaggataaagtacattgtttggttaaaaataacttcagaatctttattcttaagcaataattgaacaggatccttcttgaactctttgtgttacatattggtaaataataataatatgtgatttaatttttgcaatttacaaagtttgttcatgaatgtttcttgtgggactcttggaagaacaagctgcttttaaccatccggttttgcaaagaaggcagtgggctctagggaactctgagggcttcctatgtaaagtggccagacctcacatttcccatggcccttatgccagtgttaatattctgaacaaaggtccttttggagatttcttaacaaaatgtggattttcactccatttgttttcatataaaattaaaatttggttatactcaactctttaatgtttcacattaaaactgtatttgaagtagaaacttccagataaaattagaaggggcccacataggagtgtttcacttctctctgatacattgacttaagctgctgaaaaagatattagagagagcctgggagatgggatgatgtcactatgtgaaaaacagaattctgatctacatacggttgcttattcaagcatagtttttcttgagccatgtcttgttttggaaggaatgctgtgggtgtggttctgcaacaaaaccaagcagagttgtaaaaatgttatttttttttctacaagaataaagatgtggggatattattcaagtatttttctgtctccccaatggcctactatagagattccagttcatcaggctgactaatgaaataattttagaagttccaaaacacaatgattgttgtagaagttctcttggcatactgagtagaccattatgagataaagctgatgtcaaggctggtgttacagcagttgaatctctgagatatttctggtaattcttctcatcatatggactcttaaattgtaagagttttgggtgggattttggtttgtccatttggatgagagaccagtgacttaactctgcttggctagtaataattttttgtcccacctgaattttctttaatcaccattcaaccagtatttgctggtttagtagactttcaaaagttcagtctaaattccacaaaaatgagtatcccttccaagactttcccttacccttcctgtgttttgtgtacttccataggactcatccctgtactacttatgatttaaatgtcagtgtttgatcttaccacctcatccagtatagggactagactctgccctgtacatatttatttccctaaggtgttctcttagcaattgtgcattatattgaatgccacacaactttgaaattggaatctacttcatccttaaattgggtaaggacattaaggtaaacaaggcacatttgagacaagtgtgtggtccctaatgctcatgtctcaggagtaacagtagcatcttagttctccttgctacttgtaatttttatgttccccataactggaatatttcaggagatttcaaaaaactcttaaaaatttagtagtgctcagaatttgtgtaggaaatgagatatgttatagcttcaggaattgacaggctttggggattgactacagaacatgaattcataaaattatctttttgcagacaaatggatgtaggttgaattacagtagactaacaagaaatggccaggtattctatgaaccattccattgtctatgctttgtgttttatatacagaatgagatttcagacattctagcaacacttttcaagattccttttgttcctgattgagggaggcagtcacaccactgcaagggaagccagaggacatttataaaatcccactcatccaacagtaccttatgattgcatccatccagagctgacaagtcactgtaaagtagcgcagtagacacatatgctctttcaaacctcatgagagcatgccactcacccccacaaattaaaacagtacttttcctactggtgagtgaaacctgagttagaattcctatgagctaggaatagtacatgtcttttcataggaagtgttcacattggggtttgacttttagttttagctgccacagaggattcaggcttatgaggacacaataattgacaatatacttcaaatcaagttcacaaactgccttttagcaactcttaaagaaaaggagtatttatttagtatatgcatatatactgtattaattaaatagcaattatgtcagatatgcagaatgcttctgatgtcaaaatggtataatcattgagtaggcagccttgtggtgtttaaaatattggaaaaatctagctatatggtaactatgtttcaatttataagtcaaaatttaaccatgatggttgaaatttactttaatatccatttgtgaattcagggattctgaagacatttaaatagaaactgtagtgtaattatgtagtgtattttaagtcactaatttggacatatatttttattgattatttaagcctgtgggcaggtaatgtgtcataggggttcagagcagaccttcctactgttttgtacactcaagactgagccctgcagtttatttcccatgtgacatgctccaccttggagagggagaacagatggtatttttttattacttaaaaattgtctaaaaatatttttcaaaagttaggcatttcacacttctgacagtgataaatgggataattacttttattcaaatactaacaaaattataacctataaagcagaacacagcagaagtggcttcaagcaagttcatgcatctgtttgtcttttctaatagctaggttatagtagcttcctgcaccccctgcaaaagcagagaacccccaaacttcaaaacaagtgactacagagcacaggaaatagctccccaaacccaggaaatattcaaattaaccaataccaatagacttataaagcaggataaaataaaatggcttcctcactctccactgccctctctatatcaagaaaagactcattcccagaccccgggccaccacataatggttaactgaacaatgaatgtaaggcttcgatgggctgaatggtgacttccagaaaaaccatcttgaaacttctagtacttgaacttccttaaagcagacatgcagggtggcatgctcatttggtagaaatggcttttggtgtcagtgagctcctagacaatttctcctttgtagcctgtatgtagccctgccatttaaaaagtttcccccggggaagccctgactcattcatgactcttattttagctacacagaattgtctattccagtacaaacaatcatccatgcctcaaacttattagacttaaaagtaaataatggattagtggtttaaaaatgaataaaactttaaaatatgaatacaaaaagttaaaaacaagctattgataggtcaacatgggtgagtctgagaaccagacacagaagactaagaatagaatgaatctatttatctaacaacttagaacagcaaagccatagaaaaagaaatcaggtaaggctgccatggcttagatgacaggaaacattgactccaaattgaggattttggggaggcaaaaataatgccctaggtattgtgattatgattatgatcttacacatttgtcagaatctgaagaactatacacctcaaaatatgatgtctgttttgtagaaataatctctaataaacacatttctaaagagggtagcaagtggaacatatattgtgattaaattggctagtcactgtgttttttatttttaagtaaattttattttaagtaaaagtctgacggcaaactttttattatatcagcactaatattactatgttatgcaaataacttctaaattctttacaactctaactcattgcattctcataacaaccctgtgaggtagtaacctgggggtactattcccattttgcagatgaagagattgaatcaaggagaagacatgggttttcttaggaccacccatctggtaaatggttggactatcatttgagttgtctgtttggctttagggccacatttataactgctgcatttccatgaaatgtttaaagctatttcctaattagtaaaatatgggtaacttttaaattatcaacgacaatgcaaggaatgctaagacttaggaaagttatacttgagaatgattctttgccttagaagaattctggaaagaaattaattaatgttgttgacatttcctagggatataataagcaaacatctgttcttcccagtcagtgttactgtagcagaccaaagaaaactccacccatttaacttagtgaaccaataaatttactgaaggcacataagaacctgtggtgactcaaaggctgctacatcattggaaaactcaccagcatgggtgatgactcacaaagctaatatgcaggaagtgaagctccttggagatcccctctccccaatagtccttactgcatgtataactttgggtagggaccttgtggatcttgtaagtttcaggcacttcctatgtttgtgagttttgcctgcttcaggaattatcatttcccatcactaccaaggcctctctgtccatgaaggattgttttaattcagagaaaatagctacatatcacttaattgctctgaatccaaatcacgtgaatatataaagacatttcaatatgggcatgtagacagaagtaacatattttgaagtttggatatcgataacacttaaaataaatcaattaacacatgtgtttatttacttgaaaagatcccgtagcacctgtgataaagtaaagatgcatactgttaagctatacattttcagtttgatcctcaagatttgtactgtgggagagaactgacttttacaagcttcttcttgatgaaaatgggataataggaaattcaagagattatagaaaacgaagcagcagtttttaatatgcatgaggtgccttacatggtatttaataataccaaccatattattactgtgctttagtggcttccaaagggactatgttaataaaataatgcattttttttctgttcaaattcccatgttgcttttttaacgagtttatatgtataggtgaacctaatgaatgatgtgctctatttctgctattttacctattccttgtatagtatagttatttctattattttcctagtcatctagagtagacatcttgcaagcatctttatttatgctcactaacacttctgtctttgttataaaccacctttttgattttttactaaatagtatgtgttcaacaaataactacttggaacaaatacccaacaaatacccatcaaggagccttcattgtggtagaagataccgataaatacagtgtggtatctctttaaacatgtcagtctgtatcacaaaatagaagtgtggctggccaaggaggcaatggctaagttttgctggcttcattatctacataggtggcagaagtgttgtcccttatagaatccatgtttctgccgtttttagtggatgaacagtctttttttggccaggggggaggcttcgagacagggtttctctgtggctttgaaggctatcctggattagctcttgtagtccaggctagtctaaaactcacagagactaactggaggaagaagggtattgggattaagtccttggacataatttacatagacatatacataaacatacatacatacatacatacatacatacatacatacatacacacacacacacgcgcgcgcacgcgcacgcatacacacacagaaggggagagagttattagagtggcttacacttacaggctgtggtctgggtagtaccacactagctgtcttatggtacaaagtttttgtttagtccaagactcgttgctggatgtctcagcagtcccattctaggcctagaattccgaattccagagaattcctggagagctgctagtcttcagtctatgttggaatcccaaataacttgtttctaataccagcaaagagatgaagttgccagtggcagtgagggccacaggaagaaagcaaaaacctccttccatatccctttatgtgagttgccaccagcatgtggagctgatgtttgagtctccccacctttatcctcacaggcatgcccaagatgattgggtttgactctggatgctgtcaagttgacattgaagattacccatcagataaacaaaggagagaaagggcgaactgtcccaagataagttgaagggatgagaagaatggagagggagagataaactcagaaagagtgctaaagatgtatttttttcttgagataggaacatggtgtcaggtaggtctagaagagccaagaagcaatggtaaccctcatgtgacgttaaccatcacataagtaggaactttgatggactaacggcagacttgatcaagtaagcttctttaaagcatagctttttttttatagagagtttgaaaactaatagtaaagtaaggctttagaattgttatgagaactgctagagattcacttaagtatttgcagtggtgggttgctggcatgcctcatgagaactgggccttaattctgacagccctgctccaacaataatgactagagctcatcctctacttctcaaaaggctaagaaatagtggcgtttaattccccaggaattcaattcaactacatctgttaaactggtatatttgctgacacctgtgtacattctagaattttctgcattgttgaggaagaaaagctctagctgaaaactgttcactatttatggcttcatggcaacagatggcagaagctcatggagaactacggtgcagacactgatttgtctcagctctcaggaaaatgcctcctatgcatggtcttatcacagacttctagtgtgatgcaaagagatggtagaaattatggaggtctgagagatggtttcattgtgtttctaatttctcctatggaagttgtgctcacaggtaaacttaaaatacttatattgtcaagcttataataactgttgtaacagcaaatggaaactgataggagcagatactgaggattagatttgctcacttggctccggcaatcttaccttatcatgtttgaactttcagcctggaaatagtttccaagagctgtagatcctctacaaacatcttttatctcagtatttcagtgaagattgcaaatacccaaaaagttggcccaggatactttttggtgccaggataatgttgttatctaaaatggtctcatagtagaagaaaactagtaatctcagtgaaaactatatttttcctgtatttatttactttttgttactgcctttgattatttaagaagataccctttttattttgctttttgagattataattacaccatttctctcttccctttcctctttccaggccctctcatacactcttcctttttcaaattcatggcctattttttcattaattgtagttaggtgcataaatgtaaacacacacaaacttatctatttctaaatgcataactgcaccctgcatcttctgtatcatgttacttgcttgcatattttcagggatgaccatttggtattggataaccagttggtatgctcttcactgaggaaggctatttctctcatgcttagcattccttagttgcctgtagtcatctgtgtcaggttgaggactcctggtctttcctctgtctactttggcatgcttattggtattgtccttggtcaactcatggttaggcagtcatggtggtgagactttatggttgtagcttctgatattattagtagcagacaccgtttcatagcaaacttgctgatcctttgactctttgtatttcctcttcctcaatgttccctgagccttaggttcaggagttgttttgtagatggatccattaaaatttggccactcaactctgcattttaattggttgtggttttctgaagtgatatccatctgctacaaaagggaattccttgatgagggattaacaagcgtattgacatcatggattttctcagatattattcaaagaattagaagaaggttgatttttgctcttcatttagcctattaagtgggagcaagacagcaatgggaacagcagtattggtgagggagtcactatatagggctaggaagccattctttgaacttttccagagtctacctgtacctctcaaactgaagcctctgggatttcttttactaagaaaattaaatagtaaatcaagcctatattcctattctaattatagactttttttattttggaggtttaattcattccacacagttatatatctggtttgtaatttttttttgttttatgtagttttcatcagttacatatgcttcttaaagatgacagatgtggcctttatttttagtatgccattgtcttaattagggtttctattgctgtgaagagacactgtgaccatggcagttcttataaagaaaaacatttaattgggtggtttaaagttcagagatttagtctgttatcatcatggtgggacgtggcagtgtgcagacagacatggtgctggagaagaagttgagaattgtacatctttgagtcataggcaacaggaagtgaactgaaacactgattgtggcttgagcatataagagacctcaaagcccacctccacagtgacacacttcctttaacaaagccataactactccaacaaagccacacctccaaatagtgacactccctatgaacttaaaggagacaattacattcaaactcccaaagcccctcccttcagtgttcagtgaggctcaaggtacctaatcagtaccaaataattatttacagttgagtcacatattgtgtggacagactgctgatccttgaggactcaaggtatcaaatatattagactgctttaaatgcaaggtcttgtcaagcctgagtagggcataaagttaatggctttggctcataacaggaacgttcagctgggactaccgtgcttcctggaaagccatttagggttaataacagtaccatccacttttatgtaggtagcgctttgcaatttggaatgtagttaatggcacattactcattttagtgtcgccaaaccatgcacactggtcagggaaaagccctttttccaacaagaaaattggagtgcacagagataaggactatgtagaacttcacaaaattggtgagtggcagatctgatgctggaacccaccctttcttcgtccaaaagcagtgtgttttcctcagtctacacaactcttagcagatttttctttgttttaacatagtaaaatgctctgtgacaaggaaaatgtatagatattactctttaagagatgtagaaatagcttagtgaaaagcatctcaagtttgttttgcagttttatctagtttcttctctaagaatcctctcagagcatgagaaaggaaacagaatgaggattggaacaagaagtcttcatcggcagtcaaaagaaagggttaaaaattatgactttttaaaggcttaaagtggcgaagatagttcagaatacctaaacgcaaaaaagaaagaaagaaagaaaagaaagaaagaaaaagaagaaagaaaaaaaattcactgaaagggtgtccatcctccctgaaccttttttagtacctctggaaaagtcagggggtgtgtgtctgggggaagggtagggaggggagggttagacttcttctattaggctttctttaaaaaaaaaagaaagaaagaaaagaaaagaaaaaccacacacacactcaacagaaagaaataaaagtttgtctctctttggctccatctgcgcttaaagtctacaagaagtagtgaaaacccaagtcgcagaagcgcgcgctctgatttggttgtttaccatcaatcagacggttgcttggcagacactggatggttatgagcctgaacaagctgaaaggggcaggaaaagaagtggaggcagcattcttcctatttaaagctgcatcgcttgaaaaaagttttcgcagactgtgccggagctggtgctgaaacaggctgaggcggcctgggggctggtgctgaaaaagagccctcagcggaattcatggtgctacagtgacctcagtatctactcttcgttcccaggacccacatgtctcagatttagacatgatggcaaactgggtggtagcaagacctctcctcattctcactgttttattagggcactgtgtctcaataaaagcccaggaacaagagaatggtgagtttgccttttgctttgctttatggtgtttatggcttggtttgggactagatggaatgttaagctgcaggaagagtgtgaagaggagactatttaaagtttgagaagggggctgtgggacttgggacttgtacctgggaaacagcttgactccggagcttctgtgcttgtcctggcagagtgagctctgccgtccaggaagagccagggtagatcagttttgtttttttgtttttgtttttttttcgcctgaatgtaagaataggacgtttaaaagaaaacaagagtgcttaaaacggagccccgaaggcacttttaatcggagtcagttgtgtgggctggcgctttccgagcagggaaagccgctgcagaagctgggcagggtggagtcgttcctgcgcgaacttcagctgcttcatgaaagtctttgtttagagaaatctctgcggcaactctgatagctcggaatttcctttgtctttgctcttcattcctctttccccacagcctcatcttccccgcccaacgttttcatctgtgatcttaaaatcgtgtttgcttactgagagagagtcaagtttatttctccatgacagaggctgatggaagccagatttcttaaactgcggcattttctaaccctactgacttggttatccggacagtgtggttcctgggcgggggtggggtggggtggtggtggtggctgaaggcaggaaatcagcannnnnnnnnnnnnnnnnnnnnnnnnnnnnnnnnnnnnnnnnnnnnnnnnnnnnnnnnnnnnnnnnnnnnnnnnnnnnnnnnnnnnnnnnnnnnnnnnnnatcaaagcaaacaacaagagcaaggaaaactggcttcaaattcatttaaaaaaagtttaatccttaatttttgagggttgaaatgccaactacagacatgttctcatttgcaataggctggcatagatctgagtcatcactagtactgcactgaagcttttaacttagcacatgtgttaatcatgtctgttactgtctttctcatgtatgtagcaacccatctctatacatttgcttccttcctccctgtctttttcctctaaaaatgtttagaaactaagtttagcagttagccatgtgatctagaaaactataaggagggaaaagaagattctggagatgaatttcaagtctgtcatagtcccatagagggggccctttctaaaatcttggaacttttaagtcagtttctatgtttcaaagagtgagggaatttagaaagggtgaaacttatcatgtttcttcataatgccatggaaactatgtgttgcttgtaaatgcaaggacagaggagttaggaaagagaacaaacaaagcattaagggtagcagtaaaaatgtctattaccaggggtctgctcactcccttcccccaccaggggccaatgttaaaatgtctgtgcagacttcattcccaacttaaatttaaattatgtgcttaaatttgcaaagtatggtaacacttgaatatgtgtgttagtgaaagatataagatgtttgaaagtcttagagggtaggccatatgctaaaaaacacttctaagtcattccatgtattctgtaggtgttactgaaaaccgaggggtttacctttctctactattcatttacataaattaagaatatgagattggttcaaaagcagttctgcctctgaaccaacctcttttataccagtgttgtcaaatagcaaagaaactcaaaccccaaactgcagatttttacggagaaagtaaattctttcattgacattgattgtaattcaaaataaatgtgataaaattaattgcagaaaagtgtgtgtctaagtaaggataatatttgcgactcaataatctagtgtattcaaagccattcaaacttacactggactcacttttcatgcatacttggatgtgcactgatgctgtgtggacacttgttatacttcatttctcctgttagaatctagtaattccatgttattttttttaatttgggaaacagtacatgtggaatgtttttatattacagaaaagcctaaggcttgcatgtcaagaccatacaattttcaaattgttattataagtagcatggatagtggtatttcctttgggttcccttgaatacgtgttataaaaagctggcattgtatggacgtatatatatttaaaagcttaacctgttcttttgttagtataaagtatagctgtttctttttatttctttcttttttcccccctgtggaccatgaaacacaaacacagtcctagcctaattggaacacatatggaagctaagatatagtaaataaagttttagacatttctggccaaaatagaactacctctcactcaactttaaaagattgattggattttaaaagttttttagaaactaaaaagaaagagtttgggggttggactaactttagtagaaaagtataatgtagccaagatgataaaatcagcttttcaggatctcccccacccccaaacactccttctggtgtgtatgatgtaggggggctttggaatgttccacatttgttttttgtaagagaaaaatactaggtcattttatttccaaatcaaaatgtaacatctagggaaagatgcacatttttattattagcaccaggcataggcctccctaagactatttattgacttgaatcattttagtcaacactgcatgagtgatggagagaaggctcagaagggagtacatattgtgaacttcagtgattccagaagctaagcatgtaacataaacagtgatgcaatagttttgtgtattagcaggggtgatgggacttgtggagaactgaagacacaaacattcccattttaagcattccaaatgaacatttttcagaaagcatttcatgagccacatttaatatgtctaagagccaaatgtggctcatggactataaattgtcaatacccatgctacaatcctacactgaaacttgattccaagccagcttcaaacgagcaagagaaaaagtgcacatagggttttttttttttaatattggagtctcttgcattttttgtgatgttatatgtgtgatttatcttgtaagaatacagacaggaagcattagacgtgtgagagtcagccattcttggatgatgtcatttcaaaggaggcagaaagaaacaggatgaatatatcacttaatatattcacattcataaattgttttacactcactactattgaaatgattttattttagaatgctttatatgttagaatagagtttcaatcaagaaaaatgtaacagaagccttttccttatgttaaagaagatctcaagtagagtaatgagctgttagattgaaaagagctggagactcaaagtttttctctctgttttctttcatccctagtgtatagtctttgactttacagtccttggtgattgctagagatccagttattgcatgtagctttctagtcatctggacagagaatgagaaagctgtgactctgtatttcttaaatggtatcttcaaaacatttcaacttatttatgcttggctggaatttagtcatatagtcacacaaagatgcaagaatgggtagggaaatgtttatttgtaggtggaccatggttctgtgatgctctactattgaggaaactagaaagaattttgagtgatacactttgataactgctcatttctgagcagagtgaaaagccaagaacacaacagaaatgtgtgtgcatgtgtaataaatatataattattatctagaccacagagtgaagtgtcactctgaatacttatctctctcttcatgggaggttagggaatccattagattgaccagatattcccccatgatttcgtattgcataaggggttgcctgcagatcttggtattgatatagctttcaggtcttgtcctctttaaacataggtggtaagctcggatgtgctctgagaatcaaacctttgtaggtgagctttgctcacactggcgaagcactacattatgttgttgaccagcctgcttctgatactggtgcagagaatgcagcttctatgtaccaagtagaaaccctgggacctttggtttcctagtgattcattttactcatgaggctgactgaaatttgttggtaaaccattacaaatttgacatcatttgaggaaaagataagccaaagcctaacctccacatggtgttaggtaaataattctgctacacagaggacattcataattccaatatatttccaggtaaagttgagttcctctcacatgcctcctattcctatttttcatacactcaacatcattacgtcaagcctgggattgattattgtgaccatcccaaacatgcattcagtgaaagatgggagactaaaacaggaagagcaggttttgtcttgaggagactggaattgtgctaacctgacatggcagtatggaatcattttaaccatacagtttgctccatgccaaggataaatcatgtgtctgtggcctcattgggcacttgttagtgttggtttgggaacattttaacctaatgatttttgattctgagatcacaacattgagaagtgtatgtttacatatgagagatatagtaatggtaaaaggaaaagattagaattgttagtaagtaatgtatgatctaaatttgggtaggttgtacaaggttatagaacccaaatttatcctagaggtaactaacattcttgtatgtattattctcaatgatttgttttggagacctggatatgacatgagctattatcaatttactgaaattttgagttctttgaacttttttccatgggtgtgtatacgtgtgtgtgtgtgtgtgtgtgtgtgtgtgtgtgtgtgtgtgtgtgtgtgtttgtggtgtgtgtgtgtgtgtgtgtgcttggttgtggatacacatgtacgtggaggctgtaaattgacattaggtgtcttttttgcttctcattcctactttaaaatttactgttagtgtgtgcatgtgtgtttgtttgtgtgtgtactttgtgaggtcagttctttccttccatctttgtgtgggttctggggatcaagttaaggtagacaggatgtaccagaagagtccttggccttcaattttaattttttaaagagtatccatttagccgggcgttggtggcgcatgcctttaatcccagcactcgggaggcagaggcaggtggatctctgtgagttcgagaccagcctggtctacaagagctagttccaggacagtctccaaagccacagagaaaccctgcctcaaaaaacaaaacaaaacaaaacaaaacgaagagtatccatttatttttattttgtgtttctgagtattttgcgatcatgtatgcgtatgtgtgtggtgccttcagaagccagggtgtcagatttggaagtggagttataggtggttttgagctgccacgggtgctaagaaacaaacttgggtcctctgaaagagtgacaagagctttcatttgctgagccagctctcttgtccactcagttttgtttttgagaaaggatggttggttcatggatggtctaaagtggatggcatgtgagtttcctgtctctgccttccttttgctaggaagacaacctgactttttatgtgggtactgcttatcctaactcaggttctcatgtttccatggtaaacactttaccaactgagccatctccatagtacatgatcatttttataactaaaaattcactctaaaattagaataatctgaaagacgcagacaatttccttgcctttagatgccataagactgaagagctatgttttccatgccccatctacatggggagcaatcctgacaacagaagctttgtctttaaggtgcaactgtatgggacatttttatcttgttctaatctttataaataagctgtgcttcaaattaatatgaagccatcttctactgaatttattcaataggggaaaaatccagtgaagcaatactttcctaactacaccttgccttctagggagaaatcactcatgtccatagcattaataaatgaacacaaatacattcatggaactttattccttcaacattttggtgtaatgtacaaactgaaatgtttacttgttcaaagcttagatctaggaagaagatagcatcatagttttcctttttatggctttgttttcaatcagaactgtggcttcagtttttagatgggaactattgtgcccttggttacttctcaaggagagtcagccttgatccctccactgtgtatgagaactgtattcttggcattgttgcagctctgcaaccttccaagtcctttgcatcttcaccaaaaattgtaggaaataagacagccttgcaaatggagtctgaagctttaactgaggcacaaaatatgaatacttattccagtcgtgacaggtataagctccagcagtgtaatctttttccttttaaatgcatcttagactcttttgaagtattctatggatttgttctgtagcttgcttgttttccatctttctgaggaactagcatcaatcatgacctcttcaactacttgcctatttgccctcggcactttcttcctagcctcttgagctaggaagatggttgagcaagttcaaccatctcccagaactcatgtctcctttctgagcacaagtgcttctaaagaagagtagttgagatttctgcctctgtttcccttcccttgaatgcctcatttttcccacttgactctgactttgacccctcccccactgccagccccccaatgcatgtaagctggtgcagtaaggaatcacatacatgctaaatggatggcctctctctcctcagtttataaggtctttcttctggattaacaccattgaccactctagaatttcaaaaatgcagttctctgaaggttttccctcccctccctgactttcttttcttgttcactcataggactcctctttttctcacactagcttttttttttttttcttccttaatggttctgtcaggatattgcctttttagatcatctaggaagcttccacattgtcaagggttttgcttgctgactagtgttaactcataactctcccaccaatcccaatctttcacatgaattctagagtatatgtctatccacctagaaccattttgagtttatgtatctaaatctgtctaccttccaaggttaactatctaccctccaagaatgagctactttcttacatattacttatgtcagttaatggcaacatcattgtgtcattcagtcaataattttccaacctgtcacgaattttcccgtttcatttactaaatatttctcatataaaaataactcttattcacctttattacaaatttctcagttcaagccctcatagtccatccctggggttagtgcaatgccagctaaattcatattcttgtctctcttgtggccatttcctatcagcacctacatgcaccccgttttttaccagtgcaatcccaaactaaatgcaagcccatttttactttatagttcatccatgggaactcagtttgaagagatagcaaggttcatgcttgttagcttgcatgcattcttaatgtgacttgtcattctttacctcacaataaaatgtctcttgtaattctcacccccaaagtgctcatgcttacccttggacgtgcatgcacccccctccacacacacacataaagatatgcatgtacacacgaatgcacacacattttttctttttccaaacctctactcttcagagtgcactgagttttaattttctcttagttgaacccagtgttcctccattattatcacacagaagttagctcacctttccattccctgcatgagccatatgtgaagaatttcttcctttgtgtctatttcaccttttcctataagatgcattttttgaaagatgttatgtttcctcagaatcatccagttgggcaatttattcttacttgaccactgtactatgcttaatatattccattgtttgtgaataccctgtttctttttttttttttaactaaaaaatgtcagaattatcccactgactttcaaggctactgatctcatttcctttatgtaaacagctataattatgctttattcttaatactgtgtgccatcctttctcaggtcatcgctatgttttagttgatttgtctgtaatgattaacctcttacattctctctatgtcttctgagtggtcaagtgtactgaggctaattatttgtcttttgagaaatagagactgtaccatgaattcactttatgtttttcccttttagccaaaaaatgtcaaaaggctcttttaagcctactgtgtgcatgtgttcagataaatgggctcagatcttaaaattacgtgttgttcccacctttaattatctgtcatctctgtagtgtcaaaacaaaagcaaggaaacaaaaggctgctcagtgagcttgttccaggaggctgcatgtcctcctggtttgcactctgcttctcttggattgtttcagaggcatagaagccaaggatgctccacccatatacctgtgccactctgtgtccataccaactcagtctgcttcagagttgattttctgaaaacatgtgaatcataaaagtctcacctgaaaattggaagccaactttgtaccctgcctttctctgggtttacctttgcagtaagaggcattgcttcatggcaaagggatgtacaaggtagctccagtactacctagatatagcagtgagttgagcatctttccaaaactttgcagtgagtttctccgttatccagaggctgctaatgtacttcacttcctccactccaggatattattgtgattgactccagaaagtaaacactgttgatggttaggcactgttcggattctgcaagacttttcttgcttctctgttcaacaaatgtaaaggaaatcacaacaacaacatcaacaacaagatgatgggattaattcaagaggagagactaagataaaattttacccaataatttattacaatgaaattattttattcagtctgcaatacccaatatggttgttctctggcaatcagcattaagttttcttattatgtaactctgaagatatggggtggtctcatagcactgtactttactttagagaattaatatttttcttgctttcattacctgttacatatttatttgcctcttcagtaaaagaatctatcaggtccattcatgttaatttcaaggtattcttaaaacctctccattcccaatttcctaggactttatctggaataagtgacaagctctacagttcaattctgagactcatgtttctcatgcaagtactaaaagttttagttggaattttatgatacaatagatggtggacagtgagattaactgactgtcatgagaaaagaaaatgctttcagatttggctagagaaacaaaatctctctgacatttgcccagaaaacctatattttctttaaaacttcagaatagaaatggctatttcaaggcaaacgaaaatactctgatataataattttattttgcaaaaatttgtactgaaatgaaaacaaaatcagaaaaagaaaaggaaaaaatatctgagcagcggaaaattctaccaaggaacttacattgcagccttatggtacctgtctcagttaagtgtccacttacttactattagagcaactgctatgggctttcctgatggcttgctcagcttgattcctcatacaacccaggaccacaacactcacaggctaggctgtcccacattaatcaacaaaatgtactacacacttgcccacaggtaatctgatggaggcattttcttatttggattccctctttctagatgtctctaggtttgtttccagttgacaaaggtcaaccagcacagtgccatagtaggatgttgttttggatgcttctaaaaaatttcttgggtgctttgtcttttcttttttctttcttaatatgatactttgatctttgccaatctacacatgtgtacattgccattatatccatcttcttctttcttcaattcaacaccccatattacccttccagcttcatgctcttttcttcttatttaaaaaaatatacagcccactgagtccaatgagaatttcgtgtgtgtgtgtgtgtgtgtgtgtgtgtgtgtgtgtgtgtgtgtgtgtgtgtgtgtattttcacatatgaaaccatctgctagagtattcagtatggcagggaccatacctttaaagaaacagacctttccttccacagcagccatcagctgccataagctcctcggatagtgtgggggattcataagccccttcttcatccaagctagaatggtgactagcttgatggtgactagcttgatcttttttttttcttctttcttgcttgctttttttttttttgtgtgagacagggattttctgtgaaaagttctagctgtcctggaacttactctgtagaccaggctggcctcaaactcacagagatccacttgactctgcctccctgggattaaaggcatgcaccaccacagcctggctgactggcttgaccttgagcagcagcctcagctgctgtgagttcatgagtgcagcagtctggtcatgtccagagggcagttttccccagttctctgcagcctatggcttttacaatctcactactcaggaggatgctttcttcatcacactcagaatctgttaagtttgttaaaaggggaaatggttggaattatttcaactcataatatagaatcagggcaaattgcaacagaattaatccaagatgaaccaacgaagacattccaggttccactgtgaatatgtgtgttcagataaatggaggatgacaaaatggacctaagctagtacaatgtatgctatttccatacaattggcatgtaaaatgtgactcatacatttggtaaatatgtaccttacatggactgcctcatattcctgccatctgttccttccgtggaatgtgctagaactgtggttctcacccttcctaatgctgttgaccttcaacacagttcctcatgatgtggtgacccccaagattattttctttgctccttgttaaataaaagacccagagactgatattggggttcaagctttaagctgaagatcagaaagtcactagctcttacctctaactcagcttagaccaaagggacaatcctcaatctgcttccgacttcactgctctcagattcactcagactgctatgctctcctccatgtggctagagactaattctcagactgaatgcctctaccttttatatctctcaaatcctaagattaaaggtgtgagctccgatgcactctccagtagcctacagtggtcttggactcagagattcatctgcctttcctgagtcctggtattaaaggtgttctgagtcctggtattaaaggtgtgtaccaccactggctgatttctataacttgaggctgaatttgctttctgaatcatcaggtaagctttaataaataacaaataatatactcacagctacttctagagggtaattttgctactgttatgaattataatgtaaatatctgtgttttctgatggtcttagaagacccttgtgaaagcgtcattcaaaccctaaaggggtcatgacccacaggttgagaaccactgtgctagaaggaagagcaggtccaattcttaataagaaaaaaattaattttgatatacatgacattttaatttagtttcatttttcttaaaaggggagcatttttaaatttctctgaagaaaaatgttcagagttttgataccatatttacttttgcttctccaagatcttatgttgcagctttgtatgggtgccaccttctattttgtttatttttttatttgggttttttttgggggggggaatttgagagagtctctctacatagccctggttgtcccagaactcactatggagaacaggttggccttgaactcacagagatccatctatctctgtctcccaagtgctggattaagccatgtgccacaacactcagctttgggtaccatcttattaaccttcttaaattttacttcaaatttgagactccctcctaccttgacatcctttcagaattgcctgctatcgtgtttacttacattctgctctacagggaactaacatgctttgcgtgctctcatgtatagatccagtaatagttttttctgtaatgtgagctccttaaatggcaatttgtattggagacatttcccccaatattctttggccaatagcatgtgctgataaagtgtctcattgactctggagctcatctctggagcatgaatttcagtttgtcataggtactctacccttgtcaacagattacccatcagaacattgcaatcacctcaattctattataacaggaactgaaaattttaagttcttcagaatgtagccccaaagttgccatacaagacatgcctcaggtgaactggtcaatggaattgagatttacttcccaataaacaaatccctgtaataactttgaaactcgtgcttctgagctcctcttctttacccctctgcctgcactgccttccttctcctgctataggtgattaaacattttggtttgtcttttctttctaagaaatctcaccagcaggattcaagtcaaccttgagcaaactcttctggtcctgttcagtcagcactgtgtgggcatcaggagtaagggtttagagagcataaagcccatgggaagaagggacccctgaggggctgcaagcaattctgatcagttgagtgagacagctgaagtaaaagacaataaaatttcaatttttctgtgagcaaattgtagcttcctctgagaaggtggaatctactgtaatcattatctctcccttattcaagtctcatcagaaagcttgtctcaaagctatcagctctgaggtcctgtttgtagcatggcatctctttttcagtgggttgaaagtgacttggagcaagaagctgacaaaaatccccagcaatcagctgagtgtttatacaaaggctccatcttctctcagacttgtttgccttctggtgtattttaagactctgcttgtagagggggaagcatgcagttaccgagatgagagcttcaactaaacaggctgtaactttctttcatgaatgaattgttgaaataattttaatgaaaagcttctaacttaacgagatgagagcttcaactaaacaggctgtaactttcatgaatgaattgttgaaataattttaatgaaaagcttctaacttaaaactggaccgggacacagggattctacgttctaattgcagctctgtcatggggtcacttggtgattttgtggaagtgactcaaattctctgggcctcagaagctttcttcaaaccatgtggtatagtgttgttaagctctgaaagcctacaacgacagaggatttatgtaaattttctccaccaaggtcagactaaatagtagttataatactacagagtatatgatgcacacagttgaatcattgggaccacaatacatattttctgtgggtgatatgtttgtgtctttttaaattagggtttaaagttttgatccaggtttctagttatttcttggaggatgcagttatgacttacagatgctaattttccccaacaacataatgttcctactaagctgacagttcatccataatgagatagcagtgatcgtatagaactaacaagaaagggtagaaggtaaaaagggaagagagggagagaaaaaggaggatttgagagatgaaaggaagcatcatgggaactggctgtggaccttgtctgaagagtaggctatagaattgtcctatttcttctagttcttaatttcttatttttttgcaataatgctaattggaagatgtccagtctaaatatgtagctgtgattcactgtattggtatttcctgagcccagaacactttagaccttgctgtttgctcttctttcatttttgtgtttctctcccatttcttttcttcacaaaccatgaatgaaatatgtgaacatttttgttccagagtcctgatggaatttcactctgagacattcattctaagcaggaaataagactgaatgacttactggcagacacacaatccctctctattaaaaaaaatctctacattgtatttggagttcaaatgcatgaaatattaagatcaaagtctgatagacaaattgtagaatcagtcttgttgcctaagaaaagatgaatgcataaagaaaatagagtatgtatgtacaatggagttttatgaagtatatggcttccctattcatgtctcatcatattttagcaataaagtataaaattatgtcatttgtaagaacttagatggaactggaagtcaacaatgttaaatgaaatataatgcatatctagaaataaaaataccatggtttttctcatataccttgaattatatatatatatatatatatatgtaattatcatataacatatatacatatatatacatatatacatgtatgtatacatatataaatatagcatgaaatgtaattatcatataacatatatacatatatacatatatacatgtatgtatacatatataaatatagcatgaaattattagggggactattggagaagagggatgggtagtgggaagagagagtaaggcaggaaaggatgatggacagtgaatatgatccaagggcatgatacactttaggaaaactgacactcaatcccaaatgcatccatgctgaattagagactacaaaaagagcacagtgtcaccagctgaatggactcttcagtaagtaagagatgtacttggccatcagaaagcacgtaaatgtaatttgcttttttagggaatataaagtcattttatccttaaaatctggctaagtgaagttttctgatggccttcaataacatatccacaaaattaaggaccaaattaaaatttctaggcgttcaggtatattcaaatacattaacttctgaactaacttcatgtaatagccatttacatcattatatttgactgaaatccaactcaagtaatttcttttatttgcacactactttctcaacatgagggcctcttggatattaatgaaatgatgagcatgatctattaggttttgcactgtattagtataattttatactaagaaatgcttatagtgatattaaagtaaagcagaggactatggtttaattaagagttcatgaagttcttggcttggaaatgtttaatctatacacgatggtgatattttctaccatcattagtgtaatataacatcattttctacaaataattcattactatagtaccagtcacttctcttatctacaggaaatgctctgatgagtctcaggactgcatctaatcattattgagcagttatttataatatttgcaattaaaattcagcaaatattcactggatatctactatgtttgattattatgctagattatagaaatgccatagtgtataagacatgaacttgttgcccatgaagagagaggtaaagacatagaatacgaatgtttaaaaattaaatgcccccttaaaatttcctatttaagtaaaaaagaaattataatgtatgactatgtcatattttaaatagtttatgatcatactgattttattgatgctaaaaatgttgtcttcaaggcaggccatagcagaaggaatagggaattttgaacaaacccttggctaagatttacttcaaataagaataccacaaaatatttagttccattgaaaaattagcacacatttttactttttcatccaaagcacattacattccagtctctcttttactggtatgtatgacaagacattttgaggtagacaataatctagatgagaattccatttggtagactctgttcagtaagaatgcaaagccatccatctatcatctcctcaaacaggtagcagggtcatgtttgtgtgattattattgaagataaattattgtatgtattcttgtgccttttatatattttatttaaatgttcttagaaagtcctttagtgaatgtttgaaaatattctgtataactgtttggtatttgcttttgtttgcagttaaacttctctatttctctctctctttcactttctctctctctatgcacacacacacacacacacacacacacacacaatctgtatatatacgtgtgtgtgtgtgtgtgtgtgtgtgtgtgtgtgtgtgtgtgtacattggtgttctgtctgcatgcatgtctgtgtgagagtatcagatcagatcccctggaactggaattatagacatttaggagatgcctgggaattgaacccaggtcctttggacgagctcggacagtgctcttaaccactgagccacctctccagcccatctatatatatttttaaggattatttacttttgtgtgtgtgtgtgtgtgtgtgaaaggggggaggcattagatgtctccctctattactctatttatttgaggcaaagtctctttgtgaatttaggccttgctaccctcaacctcaaaattcttttatcattgcagctttccaaatcctatgatcacacaacccatctctaaattctccttttggaattttttccccaagtgtattaaaacatgcaccattaacaaatcatttgagggctaaagaaatggctcagtggctaagagcatttggtgcacagtcatgaagacaagagttcagatgccagcacccatgtgaaaaccacatgccctgtacaagcctggaaccccagctctgaagggcaaggaagcaaaaaaaatggctgggactttctagcttttagactgaggtcagctggggtactaataaaacaccatctcaaaaagcaactagccatctcaaccaccataggaacaacaacaaagaagaaaaagaaaataattcaataaaataaataattttagtatggattgtatttggagtaccatatattccagaaacaacatgtaggaaaaatatatatgtataaaatagtttatgatttctttagactatgcagaatatttggctatttccttcaacataatatgcatgtcatttatcaagatggataaaatacagttagaactgtagtcatattactaattgcttagactgaatttttttgttttctttccatcattcagtcactatggcaactcatcttcaactgtaattccactacttcattgaaaattttaagtgatgtattaaactgtatgagaactaatactgcatgttctgctggctgttttagatgttttataagacaatataattttacattgtgaatttagagtaatttatagtagataagtattcataaaaatatatctgagagacaccaaaagacattcaaaagagtttttttatacaaattaccaatttgagataatattattgaatataaatttgcatttctttggtgcaacctctgtaacaaggtagggtaaccttttaaaatgactttataaggctaagaccatggatatatatatcagaaaaccaatatttaatgttttgaagttttgaagtttctataaaaggataatatagaaaaataatttaatttgtcccttgaagtgtaatatgaattattgttttgtattcttttctattttaagttctctaattctcaaaatacatagtcagaaactgtttctttaaaaataaactttacagttaaaaagatgatggctcaccagtgttaaaggtagatctgtaattccattactctggaggcagagctggtcccctgaggtaagctggctagcaagtccagcttgaactggatgagctctaggctcagcatgaggccctgattcaataaataagtggagtgtgattgaggaggaaatgtgacgtcaacttcaggcctctgtgcacatatatgtgcacacacacctggacacattcctgtgtctaaataggggaatatgtatacacacaacacacacatacacatgcaagggagagagagacagacagacggggggagggggagtgagggagaaagaggaaaggagggagggagaggagaggaaatattggaaatattttggccctttaaaaatgttaaatttggcagggtggcggtggtggtggtggtggtggtggtggtggtggtggtggtggtgagttcaaggccaacctggtctacaaagtgaattccagtacagtcagaggtgtaacacagagaaacctgtcttgataaaaccgaaacaaacaaacagatagatgtttaaaaaacttttattgagacaggatgttgtcctagtcccagttggcttcttcccactcccccaagatttacttatttttattttatatgtagtagctttccctgaatgtttgtttgtgtatttatcatatgtgagcctggtgccctcagaggtcagaagagggcatcaaaaatctgagaaatgggagttacaggctgtggtgagccaccatttgggtgttgggaaggaaactaaacaagtgtttttaattgctgagtcattgctccagctgctgggctggtttctaggccctggtctgcttgtgtccaattcctgagtatttggattacaggtaagtacaaccatgtctggatcaaaagggatttgaaagcgaatttattcagtaaatattcatgtcttgtgtgtgcgtggcagacacaaacatgtctcttaggatgcagtaatgaggaagtccctgagtacacagaacctgaattacacactggagtgggtgtgggtgaatcatttccaccctctgatctctgtgacctgtgtgtagcagcctcctgtagagtgggacagtaatgcttactgacgaaatcatggctgccaacaactgacctccagatgagcctggattaactggcgaggcgtcctgtgagcacatgagtgaaatgaaaggaagggggtagaagagatgtagcccagaaggaaaatatcagagccagagggagatttgaaggtaccattcctctgattctgacaagaggaagaggggttagggcttcttttaagaaacaggaaaaggcaaagacgcagattaacttttagggtctccagaggccaggcctgtctacaccttgatattagcctgatgcaacccattttggacttataatgtcaaaaactaccagtaatacatttataggcttttcataccattcaatgagtagaaaatggttacagcagtgataggagatgaatacaataatatcaaatgaaagagagacataggatggcactgtgagctagaattgcctgatttgtaagtcttgacaatggggaggaatcattagtcagagaatatatttgaagctctaggagctggaaaaatgcaagaaaacaagtggtttattcacccttccctgagtaatgcaaactccttattgtgcaagtgacacctatttgggattctgactccccaaactccgctttgttgtttaacctgttgtctgtggcagactattattgcagccaccagaggtatagagatacagataataaatgaataaaatagctatgtatgttaatttaaaaggatacttcaacataacaaacgcaagaaagtattagaaacagggtaggtgtctagaatcgtgatttcaaatataatctactgacatgataatatttaaatttaaattaatcatggtcgaaattataatgtaactagtggctctgttagtacagaccttagaactatccatcatgacagaaatggtcttggccagtgtcattctgaatgttgtacaattttacatagggtggatccagataagaggtgggtatgaggaaggaatcaggcatgagacagggttctaaggtattccagggggaggagcaaactgcagagttataaaatagataaaagacacatgtgacacagcacatcttaaactcatcagaatgttctagtaacacagtattattttactattaggtagtggcaactactcattcattcattcattcattcattcattcattcattcattccattccattccccaagcatttactgacagcatatttttgtgctgaatttttgcctggtaaatatgtacacaaaagtgagtgttcacctgtaagaatcaagtacaataattattctcttgtaaaattcgtagttccttttgatggtttcagaggtcattggtttgataggcagagagctgagctacaattctgtattcttcttggttgaatgagggaagagggaaactggaaacattctcctgtgttgggggcttgacacttgtgtaacaccaaagatgtctctctggtcattttatgtccccttttcaactctggcgacaacacatagggcagcagcggaggcagcacgaacaagagtcaccaacaatgttccattaaattgtaggcttttccagtgagccttgaactggagacttggtcttgaaagtgtattgttcccattacgctttcatttttatcaaattttgcagctaatgacaataactttcatctgttagtaacagcaagcacaacaaattgcatctgaatgcagctttcttccttaaggaagattgaagaccttgtgagagtgcacttctacattttttgtttccttagttttttcactgtaaaatatgacctgattatactaaaacattaacatataaaatgttattattaattttatggagagtgccaaagtgtgcagtcagtgaataccaactttccatagccagggaatattggaaagctgttatccaaaggtactgcggaatctcaggaggtctgcatgggaactaccttttaaggcaaatgtatcttactggtgaaagtgatggaggatgatttccagatgttgaaatgcttgttttggcaactgctgcagaaaaccaaaacgcattgccagaacaactgaaagtgatgtgaggcactgatctaagaggggttgggcacacacaaagcaagacgtgctggattcagagaggagatccaggggacatatctgggtgaagggagctgtaatcagagctgaggaagtgcatggagtgaaagtatgcgggcctctatgttagaatacacccaagctcatctcattagtgctatgttctccactttcctatactgtcttattatcttccccataaccatcgacattatggtagtgaccatagtaactatacctgactagtatcttgtcacaggttatgaggttagtgaaatatacttggtagtggaaccaccaagtaacttgcctttaaaccctgcatccattattttctactaaaatagacttgattaagtctattgctctctacagttgtttcttcattgtagaatgttatcagaaatggcaccaccgctacggaaggaagggttgttataggaaaaatgaaatgaagtgaggtcctttatctgacccctttcatccagcctccagaattaataataaaaaagatacatttttcaaagcaacccagattttattttcttttagtcagattgactttccatgagattttataactgtctcacagacaacaaagtactctgttgggtgttgttttaggcttgttttctaaaggtaagaagtgctaaaacaagcatcgatctttgattaaatatttgtgttgaccacagtgcttctttctaccaccattttaaatgtacacgtggagtttcaaatggaggcaagaaattgttgttctgaagtagtcagcctgtgttgacctgctttaggtaaatgagtattcatctaactacattttcgtgaaccttttccctttatttctaaattgttttgattacacctttcccctgtacaatgctcttcacttcaactcttccataaacaaaggcttcttggcaatctctgttggtaaccctggtcctgggccagaaaaggccagccccttccaaagcgttagcctctgcaggagttggagcctgagatcccaattcctgttccaactattttcacaaggagtggagcaatagggccaggataagaagcagagacctctatagggagctaacagttcaggactggagaagtgagtgggctttactgcacattttctcagaagcttttcgagtgttcgtgttgaggaaagtttcactgtatattgactttgctgtaacttggtttaccatattctctgtccatactctttgacctactaatttacctaaagaaatatcagacacatgagccagaagattttggaatcttgatttgttgtctagaaatcacagactgttgaccttacctatattgtgcttggagttagctaaatgatcaattctttttatttgaaagctcttgagtcagaaaaggagtgccatagcttcttgtgtggtgttagctagcagactcttagacccagaaatgcaatttacaatgatctctgtgtttatgcaatgtctctgtgacaagcaaagaggttttaaaagcaaaatgactttcatagcattactcacaaagagagtttaccaaagctatttagaactatgaaacacgtgtaattagtggaagaatctcagctaaaatagaattttaaataattatggagactaaaattagaggccacactagtgggtctttgtagttaagatataaagaaaagaattgttgagtaatgtgtgtgggttttattcattttcttttttggcagtttgaggattgaaccaagagccacacacatgccatgtaatcactgtgtcacttagatacagctcctgtccctgttgtttagatgttaatgcaagcacaatttgataattcattttggaaggtgactacctgaaacaggatcttaacagaagagataggtatatgccaggtagctatccagtctgcacgtgacctttcatttttccttaagcacttcatgtctccagtcaagaagagtacaacagaaaacacgtcactcaaagcctaataattttactactagcttttttggtgaaatctgtattctagatcatgtcttcctaacttcccttggtattatgtaattatttaatatttacataatattaattacccagccatttgtaacctaccctagactctttgacaaaagctattttagttaaaagaagatgcattttggaagtacatacacaatcaagaatatggaaaatccattgtaacagtattggtgaggttatcatgtctaaatcacagaaaataaaaataaatgggaagggttattagtatatctcaaaatgtttgaaaaagctctagctatggaagtagagttgaataaaataagagaaaaatggcatttatttctctgaacttcaataacttactagaaccatgtggtttagaaagcacagatagttcattgcttccaatgacacattcaaagagtgatatacagaccatctgctgtgggctccatatttatacactctaatatgccatgtggcattctctatgaaagataattttaatactttggcctaacaaaatggaacaggatccctctgaggcaacatattcatttttgaaagcagccagtcaatgggtctattaccatggatactttagaaggaattcctaagaaattagactaaatagtgttttgttcttttctgcagttttttttttgtttgaatttagtggcccagtaactactgaaaaggtccctaagctcattgtaggacaaaatcctgggaagaataggggagcatttattacaaacagaaaggaattttttcaaagatcatttgtaaaaacaggagtgaagaaatcagaacttgattgaagttatcttttaattaaaaaaaaataaccactgcccacagagacactggtattttaaggtaacctttcaatctatgaaactttaagaaatgaacatttttacatctttaaaatatttgtctcagaaagttcattaataaacgtgagaggaggggaggccgagggaatgggggtatggatatgtaaatatgagtaattaaaagaaattaaaaaaataaattaaacatggaaattctttccaattcactatgtcccaaggtttcataaaactgaggtgtgcttatgtactaatatgtgacagttagcaagagatccatttgcctcgtgtacccagtcacttgtcacaagagcattttctgatataatttattgcttgttaagccatctctacagtgcagttgtaatgtagggaaggaaacaatcactgatgtttagtggccagactgttgactgctttcttttgaccatgtggactgtgagttggattcctgaaggacatattgttcaggaatgtttaccagttaagaatgatggctaattttccatattgacctcatacataattacataaattaaagcaaaccataacaactgaggctacacataaaattttacagcccctgccttgcactaagcttgaaattacatgccatacagcacatacgtcatttttggaaatatgtgtttaaacccctcctaaggattgtaaataaaaggtcctcttttagaatatgccaccatggagttttcctcttgaaaagtctggttactgagatgacttattgggtaaaggtgtttgttgacaaacctgatgaccgaattacattcctgggacctacatggtaggatatggagacccacagcagatgtatgctaagtaatgaatacatcattgaaaatgacctacctatgtttcctgctaccgcacgagtagtaagttgttggcatttaggaaactaaatgccagccctgggacttaaatgtaaccaacatccacaaactactctctgaccttcacatgtgtgcaattgtaaatgtaaccaacatccacaaactgctctctgaccttcacatgtgtgcaattgtaaacacacatgcatacgcaagtgtaacaataagtctttccgccatggccacccaagccctgcttccatgtgggcactttctgccaggccgcccaagttctgcccactgctacattaaggtctcaagtaacacacagagacttatattaggttcaaatgctgcttggctaatgactagaatttctcatctgctagctcagtcttaattatcataaatctatatattttataagacttatagaggatgccttccgctggcaccctctcttgctggcagatcacatggtaactacagagcagaaaccagtaggaagagagaagggaaaagggcgacttccttcttgcccttgcttatatactgaatctgcctgctatgtcacttcctgtctggatctttttactgcatttcccagaatcctccttgactcctaatcccacctatcttgcttcctcattggccaaacagtactttatttaacaataaggtaaacatacacagaaggacattccccatcacacatgcacatacatgcgcgcacacactcacacatacaaatataaaattttattcttctattttttaaaatttgtctactaagtaagagaaaaggagtatgtaaaaccagggacattttttttatctacttactcatcaatttgcttttcctagaacataattacttgataaaaatttctaaagctgggattccaatctgctttagctcctgcctgctgtgtcagagggatgtaagaccgagttaacacatttaactgttaaataataaaagactctttgcttttgcatgaaaaaaataaaactaccaaataatccaggcggtggtggcacatgcctttaaacctagcactcaggaggcagaggcagacagatctctgtgagtttgaggccagcttagtctacagtataaattccatgacaaccaaagttacacagagaaaccctgtctaaaaaatgcatataaaaattatataaaactaccaaacaatttttttttggttttttgaaacagggtttctctgtgtagctttggagcctatcctggcacactctctggagaccaggctggccttgaattcaccagaggcagagttccacctgcctctgcctcctgagtactgggattaaaggcgtgtgccaccaatgcctggcccaaacaatttttaaaactggaacagaaatggggagtttttattgaacccaatgaatagagaagtcatcttttattgcatttataatttgtaattacaatttacctggacaggtagcccatgtaatatgtgatttgaggggttggtgatgtggcaagtaattgctttttcttaatgtaatcataagatgtcacaagtaaagttgcattgtgtgcttctttaagaattacttgtgttccaactttgataaaatgtataccccacactaaatacattaactaatattttctttgtgattgtggagacatttagttatctttcaaatattaatgtttcaagattattaatcagaaagtattattacattcattttacctctaaaatgattttgtttaaagtttgcagtacttatcttcccagctaggtgctggagcaacatacaagattaatgaaggaaaaccctttattgaagcctcacctgttttttttttctttctcttttgtaacttctactctttcccaatttcatacatgtacgctctatagttccgtcactctcccatgtgccctctcctatgtccttcctaccccaaacatcattccttcctcctcctaatgtctttccattctttactgactttagttttgtttagagtcccagagaatttaattagggctgtcttgtgagtcctatgttaggaactaaccattagagcctgactggctcaacactgggtataaaactgggtactatgactctctttcatccagaatccattatctaacaatcagcaatgtgtgataaggccttgaactccctttctccctctataactgttaggaggaattaacttttgtggcccaaatgctagtatagacaccagtgagtttctcttgccatggctgtgtcaggcttagaagatagtattgctcagactttcttctcattctccagttcttacatttctaccatcccctcttccatgatgttctctgagcctttaagaggtggtataaatgtcttgtttggggctattctctcaaccatcctttatttttagcatctgtgcagccacaggtcttggcgtttacctctgtttactgcaaggagtggcttctagggttaaggctgagagtagcttctgcctgactcaagtcagatccaaacagcctgttttctttttttgataagaagaaagttgacatggctttggctggataaataacactctactttccaaaatttttattagcattgttattggagacagtagcagaattaaaatgagctcagtgacccctcttatagtttaggaatttttactttggctaaggctgaagtctatgcaaattaatgatctcttatgatggatcatgtttttgagatgaaacatcttcgcagacaaatgaggtttcagaaaaaaagctatgattatagaatatatgacattcctggttgcattttgtcaacttgacaacagcttagacatatatggaaagaagagaaaggattgagaaacaagattggtctgtaggcaagctgtgggggcattttcctgattaatagttaattcaggaaagcccagcccaatgtatgtggtgccagccctgagcagatggtcttgtgatgtataaggaaaaagaacaagttaagaggagcaagccagtaagcagcactctcccatggcttctgatctacttcctgcccttcttgagttcctgccctgattctttccagtgatgggctattaactgcaagtgtaagatgaagtaaaccctttcctccccaagttgctcttcatcatggtgttctaccacaacagtaaacagtctaagacagaggctttcacacatacttcttgccctatttatatcttataattgctaattaaatctttttgattgatgcagtacttagacaccattagggatttcatgctttttttctttaccaacttgatagtattttctttttaaactttaattttcatatttcaagtctcatggcttgttagatcacattcttgttgatttctttaacttcccaggctcaaaattgagactattttatgtatggattcacccagagttcatactcttttgtgtttgtttgacttttaatgacatcttgtttatttctatgtatatttatttaaatttagaaacctaacatgaatgctacttttctctaagttctagatattgctatatgtgtgtttatgcataatatgtctgtgtgtatatgtatagttttcaaaaatgttagtattaaaactaacatcttgcttaggtgtcttcaagaatgatttcacaaatttctgagattatttctctgggtctttttcatctttttatattcatgaatatttactccaagagaataaaaataagttctcttatttttatttataattctcttgcattatctcaatgcaaataagttgtccataaagaagttcattaatccctcatatacctatcaaggatcatccttaaggatagtcacttgtaatttttttattttccagaggagttttaggattatccagtattatctgtgaagatttgggtcccagtgctgaagcacttcattaccggctcaccagatagatgttgcagatagtaccagacagagagaaatatgctttcatctcctccatactcctttcaacttttctttctctctgtccttttgttcttaatcttgttatcccaaaattgactggggcaccccagtgtactaaatggattccaatataaaacccaaaaatatcactctgatactatgtatgataatttgggtactgttctatctagagtagttatagcatacaaaatcttgaaaagctcaatatctgggcttctttctacctgaagaaacacttttttggagatacatgtgtcaaagcatctttggaatccagtggtaagtcaatatttaagcagtcttgttctgatccatgttatatactctttaaaaatacagatacactacacctatcagttcttgcattaaatgctttcttagcttgacaattgtaacagattatttaagcattgttttcctttccaggcctctgattccctttgtggggtctgttatagtaagcatatacaatgtatgtatcaagtcgatgtagtgaatcccaccaaattgcatgtgtgtaattaaaatttagattatcagaatattcaagggattctgctaacaaatggagttaagtttgacaattcttttttttttaattttggctaatttgtttctaagcagtcacatgattggctcattgttcaatatctaacccttaccttctgtcataatacttgagaaactagtttctcaagtatttctctgtatcaaattttatgaataattgttttcaacaatttacttaatatttctgaaatgcccattgaaactatactttaagtattgaaattatcaaataaataaatcaaaagggactaaaaactaatgacccattgaatattctccaaacataccattttatttttaagattccttcaggttgtctggttggattcctttcttctatttgacattttaaagaatcttcttgttggctttgaaattccttgtaacatagcttcacaaatagttttctggtctgcctaatttctactggtctctgacctgtcacactttggaagcctttctttttccttcatttgcaagctttccttttcatgctatttctctccatagtcagattttaaacaaaagaggcaattctattctcagactgcttcaaactccttagactgcactgttcctcatactgcactgctctcagattgccttttacctagactgcactgagttcctttctcctcctgccttctattcctctctccacccagtggtatcactcaggtctccacctctctagggctgggattaaaggtgtgggaccccaaatgctggggtcacctttgtgtgagctctgtttcttttttagacagattcattctcgagtagccctggacagccttgaactaacagagatccctctgcctttgtcttgcaactcctgcaattaaaggtatgtgccaccactgtctggcctctgtggctaactagtgtggctagctttgcaatctgatcttcaggcaagcaaaatatcaccacaccaggcgtctaatggttacttaaaataggctccagaacttctgtggctcatcaaatatattaatttttacttgtttaaaaataatgtaggattttcatttttttcctaaaattaaattattttgtatggcactcctattttcaccaaacactagtcctgattgtaaacaggaaatacaagtgcacatctgtgatatggcaccaatccctgccctactctgtctagatgttgagaataaaatttaagaaaacagtcatttagagtcttcttgcatttaaatatgttcaactgactgataagaggatgagcaataaaagtccacatggctactattttaccaattatgtttactttcctaattgttctatactatttgaataattttaacagctagctgtaggtacagtgtaactttaatgcttttagacaataatccagactttaatcatgttatccttaatcaattctgctttattattttttccaactttttaaatttgaattagaaacaggattgttttacatgacaatcccatttcccttcccccaccagtcctcccctacccccccaactaaaatcttatttgtcacatatcttttcttgtcacttatctgtgaagctatggaaggtgaggccttccatagggtgtcatcagagtctttcatatcctttgggatagggcctaggcccacccccgtgagtcttggctcagggagtgttcctctatatggaatgggctcccaaagtccacacttatgctagggataaatactgggcttctacaggaggtcccatagatttctgaggtttcctcactgaaacccaagtttctggggtctggatcagtcccatgctgataatccagctatcagactgaggagcaagagttcccagatgttcaggtcagctgtttctgtgggtttcaccagcctggtctggacctctgtgctcttcactggtccttctctgcatctgggttccagttcagatcagtgattagttatgggtgtcttcttctacttccaccagctgctggatgaaggcatataagtcagtcatcaatctcataatcaggggagggcacttaaggtagcctctcctctgttgctgagatagttagctggtgtcatctttgtagatctcccttagctgttaaaggctaggctcacaaccaaaaaaaaaaaaaaattcagctttatttaactatatgagttttggaaaattttatactacagatctttgtaaataatatgttctcttgagccttgatgtatcctgatagctttttgtaaagtatagtttcttcattgatcatccattcaagtattatctatatgtcctcactgagatcaaaaccttctctgtaggttattgtatagttgaagtacatttaacatggtctaaatttatggtcctttgccttaactctactatgtcattcagggtatgtacaaatatgagagtcacatttttttttcttacatgacaaactccactcattcaatatctttgtggatttattaattttaactgggtatttaaggtcctatgaaaaggtcatgttattaaggactaggggctcaatttctgccttatacttaccttctctcatgtaaaaagaaccttttttcatgtcagttactttcatagtctcacctcatacttcatgtgttagtttttctttatgatctaaggaactgtgcaagtgtttgctttcctttaaagtattgtgtttatgtcatagaaatcctatgggagaaactcttctgctcactagctaataataattgtttaatcatgtctgctaatctaggcaatataataaacgtataaatcataaatgacagataaggctttaggatgtttgcattcatggagtttctgaatcagtctgtgatcaaaataatgtataagtgtcaattatttgattttgaaccccagtaataggtaataatgatgtggatttttattgttcatccttccataggtagacagaatatacatttaaatgtttttagtgtaagcttctattcttacatataatcatgaattaatttaatttagttgcttgtgatttttctttaccagtttgtaagccctcaaatgctttcactttgtgtgtttggagttaaatataacatttacatgttggatattcaactgtggcagacatttaacagatatttggggtctgtgtctataaatatattgtcgtattagtttcatcactacatggaactcttttatactttttattttgttttttagagacagggtttctatgtggctttggaggctgtcctggaactagctcttgtagaccaggctggtctcaaactcacagagatccacctgtctgcctcccaagtgctgggattaaaggcgggtgccaccaacactcagtggttagtacttgccttttaatagaaaccaaaagctatggtggcccatacaaatgggaagtgtacaaaataagcacaattttgtttgtatgaatgcatgtattatcacagcatgtcttatctcatttatccagagcctgagttagtgaagtttatatatcgacatggaggcactcatcacgtccacttttccttatatatggatatggaagtactcaagtccacttttccttatatatggacatgtgcacaatcatcatgtccacttctccttatctatagacatggaagaactaatgtccacttttcctcatctatggacattcaggcaattatcatgtccacttttctacacatgattggactgagatagtagcttgcaatctttaaaggtgattctggttgtagattagggaaacacagctttctatgatgttccaaactcagagaagtgccagttcagaatggatcactgtaatgatagagaattgtctgctaatgcaccccaggagctcttgaaatctcttatcttattaatttgggaggactgaagtcctcttctgtagaatgtaatttcccctctaaagaatctgaggaatcctttcctgctcagaagcaaatagagaaggcttcatctgcattaatcatgctgcttagtgcccacagtgtgattaagtctccagatacttttctatataatataaactagttagttatctggtgtttcagtgtttcatggttttttttttttttaaattttattttattttattagttctagttagggaacaagcttatttcaagtcccttctccctctccctcccctcacccccaaactttctcnnnnnnnnnnnnnnnnnnnnnnnnnnnnnnnnnnnnnnnnnnnnnnnnnnnnnnnnnnnnnnnnnnnnnnnnnnnnnnnnnnnnnnnnnnnnnnnnnnnnnnnnnnnnnnnnnnnnnnnnnnnnnnnnnnnnnnnnnnnnnnnnnnnnnnnnnnnnnnnnnnnnnnnnnnnnnnnnnnnnnnnnnnnnnnnnnnnnnnnnnnnnnnnnnnnnnnnnnnnnnnnnnnnnnnnnnnnnnnnnnnnnnnnnnnnnnnnnnnnnnnnnnnnnnnnnnnnnnnnnnnnnnnnnnnnnnnnnnnnnnnnnnnnnnnnnnnnnnnnnnnnnnnnnnnnnnnnnnnnnnnnnnnnnnnnnnnnnnnnnnnnnnnnnnnnnnnnnnnnnnnnnnnnnnnnnnnnnnnnnnnnnnnnnnnnnnnnnnnnnnnnnnnnnnnnnnnnnnnnnnnnnnnnnnnnnnnnnnnnnnnnnnnnnnnnnnnnnnnnnnnnnnnnnnnnnnnnnnnnnnnnnnnnnnnnnnnnnnnnnnnnnnnnnnnnnnnnnnnnnnnnnnnnnnnnnnnnnnnnnnnnnnnnnnnnnnnnnnnnnnnnnnnnnnnnnnnnnnnnnnnnnnnnnnnnnnnnnnnnnnnnnnnnnnnnnnnnnnnnnnnnnnnnnnnnnnnnnnnnnnnnnnnnnnnnnnnnnnnnnnnnnnnnnnnnnnnnnnnnnnnnnnnnnnnnnnnnnnnnnnnnnnnnnnnnnnnnnnnnnnnnnnnnnnnnnnnnnnnnnnnnnnnnnnnnnnnnnnnnnnnnnnnnnnnnnnnnnnnnnnnnnnnnnnnnnnnnnnnnnnnnnnnnnnnnnnnnnnnnnnnnnnnnnnnnnnnnnnnnnnnnnnnnnnnnnnnnnnnnnnnnnnnnnnnnnnnnnnnnnnnnnnnnnnnnnnnnnnnnnnnnnnnnnnnnnnnnnnnnnnnnnnnnnnnnnnnnnnnnnnnnnnnnnnnnnnnnnnnnnnnnnnnnnnnnnnnnnnnnnnnnnnnnnnnnnnnnnnnnnnnnnnnnnnnnnnnnnnnnnnnnnnnnnnnnnnnnnnnnnnnnnnnnnnnnnnnnnnnnnnnnnnnnnnnnnnnnnnnnnnnnnnnnnnnnnnnnnnnnnnnnnnnnnnnnnnnnnnnnnnnnnnnnnnnnnnnnnnnnnnnnnnnnnnnnnnnnnnnnnnnnnnnnnnnnnnnnnnnnnnnnnnnnnnnnnnnnnnnnnnnnnnnnnnnnnnnnnnnnnnnnnnnnnnnnnnnnnnnnnnnnnnnnnnnnnnnnnnnnnnnnnnnnnnnnnnnnnnnnnnnnnnnnnnnnnnnnnnnnnnnnnnnnnnnnnnnnnnnnnnnnnnnnnnnnnnnnnnnnnnnnnnnnnnnnnnnnnnnnnnnnnnnnnnnnnnnnnnnnnnnnnnnnnnnnnnnnnnnnnnnnnnnnnnnnnnnnnnnnnnnnnnnnnnnnnnnnnnnnnnnnnnnnnnnnnnnnnnnnnnnnnnnnnnnnnnnnnnnnnnnnnnnnnnnnnnnnnnnnnnnnnnnnnnnnnnnnnnnnnnnnnnnnnnnnnnnnnnnnnnnnnnnnnnnnnnnnnnnnnnnnnnnnnnnnnnnnnnnnnnnnnnnnnnnnnnnnnnnnnnnnnnnnnnnnnnnnnnnnnnnnnnnnnnnnnnnnnnnnnnnnnnnnnnnnnnnnnnnnnnnnnnnnnnnnnnnnnnnnnnnnnnnnnnnnnnnnnnnnnnnnnnnnnnnnnnnnnnnnnnnnnnnnnnnnnnnnnnnnnnnnnnnnnnnnnnnnnnnnnnnnnnnnnnnnnnnnnnnnnnnnnnnnnnnnnnnnnnnnnnnnnnnnnnnnnnnnnnnnnnnnnnnnnnnnnnnnnnnnnnnnnnnnnnnnnnnnnnnnnnnnnnnnnnnnnnnnnnnnnnnnnnnnnnnnnnnnnnnnnnnnnnnnnnnnnnnnnnnnnnnnnnnnnnnnnnnnnnnnnnnnnnnnnnnnnnnnnnnnnnnnnnnnnnnnnnnnnnnnnnnnnnnnnnnnnnnnnnnnnnnnnnnnnnnnnnnnnnnnnnnnnnnnnnnnnnnnnnnnnnnnnnnnnnnnnnnnnnnnnnnnnnnnnnnnnnnnnnnnnnnnnnnnnnnnnnnnnnnnnnnnnnnnnnnnnnnnnnnnnnnnnnnnnnnnnnnnnnnnnnnnnnnnnnnnnnnnnnnnnnnnnnnnnnnnnnnnnnnnnnnnnnnnnnnnnnnnnnnnnnnnnnnnnnnnnnnnnnnnnnnnnnnnnnnnnnnnnnnnnnnnnnnnnnnnnnnnnnnnnnnnnnnnnnnnnnnnnnnnnnnnnnnnnnnnnnnnnnnnnnnnnnnnnnnnnnnnnnnnnnnnnnnnnnnnnnnnnnnnnnnnnnnnnnnnnnnnnnnnnnnnnnnnnnnnnnnnnnnnnnnnnnnnnnnnnnnnnnnnnnnnnnnnnnnnnnnnnnnnnnnnnnnnnnnnnnnnnnnnnnnnnnnnnnnnnnnnnnnnnnnnnnnnnnnnnnnnnnnnnnnnnnnnnnnnnnnnnnnnnnnnnnnnnnnnnnnnnnnnnnnnnnnnnnnnnnnnnnnnnnnnnnnnnnnnnnnnnnnnnnnnnnnnnnnnnnnnnnnnnnnnnnnnnnnnnnnnnnnnnnnnnnnnnnnnnnnnnnnnnnnnnnnnnnnnnnnnnnnnnnnnnnnnnnnnnnnnnnnnnnnnnnnnnnnnnnnnnnnnnnnnnnnnnnnnnnnnnnnnnnnnnnnnnnnnnnnnnnnnnnnnnnnnnnnnnnnnnnnnnnnnnnnnnnnnnnnnnnnnnnnnnnnnnnnnnnnnnnnnnnnnnnnnnnnnnnnnnnnnnnnnnnnnnnnnnnnnnnnnnnnnnnnnnnnnnnnnnnnnnnnnnnnnnnnnnnnnnnnnnnnnnnnnnnnnnnnnnnnnnnnnnnnnnnnnnnnnnnnnnnnnnnnnnnnnnnnnnnnnnnnnnnnnnnnnnnnnnnnnnnnnnnnnnnnnnnnnnnnnnnnnnnnnnnnnnnnnnnnnnnnnnnnnnnnnnnnnnnnnnnnnnnnnnnnnnnnnnnnnnnnnnnnnnnnnnnnnnnnnnnnnnnnnnnnnnnnnnnnnnnnnnnnnnnnnnnnnnnnnnnnnnnnnnnnnnnnnnnnnnnnnnnnnnnnnnnnnnnnnnnnnnnnnnnnnnnnnnnnnnnnnnnnnnnnnnnnnnnnnnnnnnnnnnnnnnnnnnnnnnnnnnnnnnnnnnnnnnnnnnnnnnnnnnnnnnnnnnnnnnnnnnnnnnnnnnnnnnnnnnnnnnnnnnnnnnnnnnnnnnnnnnnnnnnnnnnnnnnnnnnnnnnnnnnnnnnnnnnnnnnnnnnnnnnnnnnnnnnnnnnnnnnnnnnnnnnnnnnnnnnnnnnnnnnnnnnnnnnnnnnnnnnnnnnnnnnnnnnnnnnnnnnnnnnnnnnnnnnnnnnnnnnnnnnnnnnnnnnnnnnnnnnnnnnnnnnnnnnnnnnnnnnnnnnnnnnnnnnnnnnnnnnnnnnnnnnnnnnnnnnnnnnnnnnnnnnnnnnnnnnnnnnnnnnnnnnnnnnnnnnnnnnnnnnnnnnnnnnnnnnnnnnnnnnnnnnnnnnnnnnnnnnnnnnnnnnnnnnnnnnnnnnnnnnnnnnnnnnnnnnnnnnnnnnnnnnnnnnnnnnnnnnnnnnnnnnnnnnnnnnnnnnnnnnnnnnnnnnnnnnnnnnnnnnnnnnnnnnnnnnnnnnnnnnnnnnnnnnnnnnnnnnnnnnnnnnnnnnnnnnnnnnnnnnnnnnnnnnnnnnnnnnnnnnnnnnnnnnnnnnnnnnnnnnnnnnnnnnnnnnnnnnnnnnnnnnnnnnnnnnnnnnnnnnnnnnnnnnnnnnnnnnnnnnnnnnnnnnnnnnnnnnnnnnnnnnnnnnnnnnnnnnnnnnnnnnnnnnnnnnnnnnnnnnnnnnnnnnnnnnnnnnnnnnnnnnnnnnnnnnnnnnnnnnnnnnnnnnnnnnnnnnnnnnnnnnnnnnnnnnnnnnnnnnnnnnnnnnnnnnnnnnnnnnnnnnnnnnnnnnnnnnnnnnnnnnnnnnnnnnnnnnnnnnnnnnnnnnnnnnnnnnnnnnnnnnnnnnnnnnnnnnnnnnnnnnnnnnnnnnnnnnnnnnnnnnnnnnnnnnnnnnnnnnnnnnnnnnnnnnnnnnnnnnnnnnnnnnnnnnnnnnnnnnnnnnnnnnnnnnnnnnnnnnnnnnnnnnnnnnnnnnnnnnnnnnnnnnnnnnnnnnnnnnnnnnnnnnnnnnnnnnnnnnnnnnnnnnnnnnnnnnnnnnnnnnnnnnnnnnnnnnnnnnnnnnnnnnnnnnnnnnnnnnnnnnnnnnnnnnnnnnnnnnnnnnnnnnnnnnnnnnnnnnnnnnnnnnnnnnnnnnnnnnnnnnnnnnnnnnnnnnnnnnnnnnnnnnnnnnnnnnnnnnnnnnnnnnnnnnnnnnnnnnnnnnnnnnnnnnnnnnnnnnnnnnnnnnnnnnnnnnnnnnnnnnnnnnnnnnnnnnnnnnnnnnnnnnnnnnnnnnnnnnnnnnnnnnnnnnnnnnnnnnnnnnnnnnnnnnnnnnnnnnnnnnnnnnnnnnnnnnnnnnnnnnnnnnnnnnnnnnnnnnnnnnnnnnnnnnnnnnnnnnnnnnnnnnnnnnnnnnnnnnnnnnnnnnnnnnnnnnnnnnnnnnnnnnnnnnnnnnnnnnnnnnnnnnnnnnnnnnnnnnnnnnnnnnnnnnnnnnnnnnnnnnnnnnnnnnnnnnnnnnnnnnnnnnnnnnnnnnnnnnnnnnnnnnnnnnnnnnnnnnnnnnnnnnnnnnnnnnnnnnnnnnnnnnnnnnnnnnnnnnnnnnnnnnnnnnnnnnnnnnnnnnnnnnnnnnnnnnnnnnnnnnnnnnnnnnnnnnnnnnnnnnnnnnnnnnnnnnnnnnnnnnnnnnnnnnnnnnnnnnnnnnnnnnnnnnnnnnnnnnnnnnnnnnnnnnnnnnnnnnnnnnnnnnnnnnnnnnnnnnnnnnnnnnnnnnnnnnnnnnnnnnnnnnnnnnnnnnnnnnnnnnnnnnnnnnnnnnnnnnnnnnnnnnnnnnnnnnnnnnnnnnnnnnnnnnnnnnnnnnnnnnnnnnnnnnnnnnnnnnnnnnnnnnnnnnnnnnnnnnnnnnnnnnnnnnnnnnnnnnnnnnnnnnnnnnnnnnnnnnnnnnnnnnnnnnnnnnnnnnnnnnnnnnnnnnnnnnnnnnnnnnnnnnnnnnnnnnnnnnnnnnnnnnnnnnnnnnnnnnnnnnnnnnnnnnnnnnnnnnnnnnnnnnnnnnnnnnnnnnnnnnnnnnnnnnnnnnnnnnnnnnnnnnnnnnnnnnnnnnnnnnnnnnnnnnnnnnnnnnnnnnnnnnnnnnnnnnnnnnnnnnnnnnnnnnnnnnnnnnnnnnnnnnnnnnnnnnnnnnnnnnnnnnnnnnnnnnnnnnnnnnnnnnnnnnnnnnnnnnnnnnnnnnnnnnnnnnnnnnnnnnnnnnnnnnnnnnnnnnnnnnnnnnnnnnnnnnnnnnnnnnnnnnnnnnnnnnnnnnnnnnnnnnnnnnnnnnnnnnnnnnnnnnnnnnnnnnnnnnnnnnnnnnnnnnnnnnnnnnnnnnnnnnnnnnnnnnnnnnnnnnnnnnnnnnnnnnnnnnnnnnnnnnnnnnnnnnnnnnnnnnnnnnnnnnnnnnnnnnnnnnnnnnnnnnnnnnnnnnnnnnnnnnnnnnnnnnnnnnnnnnnnnnnnnnnnnnnnnnnnnnnnnnnnnnnnnnnnnnnnnnnnnnnnnnnnnnnnnnnnnnnnnnnnnnnnnnnnnnnnnnnnnnnnnnnnnnnnnnnnnnnnnnnnnnnnnnnnnnnnnnnnnnnnnnnnnnnnnnnnnnnnnnnnnnnnnnnnnnnnnnnnnnnnnnnnnnnnnnnnnnnnnnnnnnnnnnnnnnnnnnnnnnnnnnnnnnnnnnnnnnnnnnnnnnnnnnnnnnnnnnnnnnnnnnnnnnnnnnnnnnnnnnnnnnnnnnnnnnnnnnnnnnnnnnnnnnnnnnnnnnnnnnnnnnnnnnnnnnnnnnnnnnnnnnnnnnnnnnnnnnnnnnnnnnnnnnnnnnnnnnnnnnnnnnnnnnnnnnnnnnnnnnnnnnnnnnnnnnnnnnnnnnnnnnnnnnnnnnnnnnnnnnnnnnnnnnnnnnnnnnnnnnnnnnnnnnnnnnnnnnnnnnnnnnnnnnnnnnnnnnnnnnnnnnnnnnnnnnnnggtggggtgttctggtctggggtcgggagcgggcaggagctcactcacctagttccaggtcagtctgcggcgggggctgtttttttgttttgttgcaattgtaagtactattgtatttccaaattcattagtattaaaaacaaactttctgatgagggtgtacatatgcatgtgtgtaactgtgtgacatatagtggattttgttgttaggttatttgaaaactccaaagtattatatagcatatatatctaaaaatatccatgcatattgtgtatgcatatatatttttgtttgactttaatctgagtattattgcaaagattatattgaagccaccacttttccttatgagggtaacctataccgccattaacaagccccgttttgtaactcaaaatttagaataaaaagagcctcattatttctctcttctttcccttgaagaaaatacagcatttgatctcttaactctgtaaaagtaatcagtttcccatccattctttcatgaaatcacagtttttcgtaggggcaaattgtttcttccttttatctgtgtttggtttttgaattactaggaaaactctccagaacgttcttgcactctgtttcctgaggccccagcttcctccacagcagcagaggttctgcttgggaggaatgcttctgagtatccacgcccatcttaccaccatctgctctgcagatgagccacacagcattgttttttgctctttcttcaaggtctgaaaaacagattggaagcaaaattctaacccagtgatgcttagcaaattaatcttcatacttgcatgaagttgctcaggaatttcatccatgagctccgtgtttatttcaagaatgaacacatcacacctacgagtaccatctgcaggacattttcctgctgtgtgacattgccattctttttctgcagcctagctagatctcacaccttttctaagtcagggttaagtgctgctcttctgtgaagtctctcctctgtcttattccatagatctctttcattacccaaaactgttttacacagcattggtgtttataattgcttaaatgccttgtctgtttaatcatactgtaattagcctgatagcaggaatttttatttttttaattttgttttgcagtcccaaaacaaggaacataggccattctgtaaccagttgctgaaatgatactacaccaatgcctttgaagaaacctgattataacagagtaaattataggattaagtctgtaaaaaaaaatgcagtcagaaatttaggaagtggtataactttcttttattctagacaactgggcatagaggaacactgtgaaaacacacacaagaaacaaccaaaccagacagtagtcacaacttcaagctaggtctcattgtacaataagatggggaagaaactctggatcaaatgtcagctcccagtggctactgggagcctctgagagtttacaaaattccccataattcctcagtccttcaccaagacaggtgaagcaggtgaagggctcagtggattaggaggcagataatattgcatactctgtgtggtaggaagctagaggccaagtatctgggaatttatttgtcacattgggagaaaaatctaagtaattcttgctgatgtgaatataggttttgagttggcacaggaaactgatcttaatgagaactgatcttaatagtccagagaatgcggaagtgacaacagtaggagagcaacagacacggcctgtaaggtgtgaatatcaagatggagggcatgacataattcacactgtgaggatgaatttgttatcaggacagactgtgtttgggtacaagaactgaggcttagagaaggtgacatggctgacatgccatttaagaagacaattttaatggctacattgaaaatagatggcaggacagttacagaaaaatatctgtatgtctgtggtattaaacactgaaaaaatggagaaacaagtaaggcaaaatacacacaacttatttggttgactctgtaagcttgccatctgggaaagagtacttaggaaattaagggggtggaataaataatggtaactattatcttttcaatggatatctattaataatacttatttttataaggttaccatttgttaagattctcatgagcacagtgagttattaggcccaatacggtacatccttataaataaagcaaggactattgtaatggcattagcaatattttcttaacgtaagcttcaagtattattttaatagaatcatttgctttactccatttacaaactctatgtcatgcgctaacttcatacttaaccacatcctgaactcctgtggttcacatatgtatttcctgaagtgtgactctagtcagcagtggcccatggggaaattttaaagagcagatgttttaagtttccatattatgtttgcccgtatgctagagaaaactatataaatgatcaaatttgagattatttcacattctgcattatatggaagccaataagtgtatcttccatattatgtttgcccgtatgctagagaaaactatataaatgatcaaatttgagattatttcacattctgcattatatggaagccaataagtggtggcacatgcctttaatcccagcactcataaggcagaggaagggggatttctgagttcaaggccagcctggtctacagctaggataactaggggtacgcagagaaatcctgtattgaaaagcaaatgaaaaagtatatctttaacaaaaaaatacacaaaataatggcacctaatatatacagatgcacataaaattgtagtaatggtaaaatagtgtgaaacatagaattaatttgtgcagtgtgtgtttgccataaaggctaagcatttattataaaaataagatgactaagattttgtgagaggattatacacttttagacatgtctagtgtaaagagtagattttcaacagaaattattttaaacaagaatagctaacatgcaattttatcttttctttcactatacaacccctctgtgactacatattttagtgagtgagagaaccagaaatactaataactcatcccagtcaagttggtcctctacttcctatgattcacacagcccagctaaagtcccagaagaatggactccttgtgtcacatagagaaaactctgagaatgggctcccccttaactccttgtgtcacagagaaacagctctgagaatgggctctccattagcttggtaaaatcattttgcctcaagagctctaatctctttatctgtaaagtaggaaactaatttctgcttcagtttggtataagcatggatcagataagatatgaaaaaaagcacatatgcatatgtgacccgatcagtattagtactgcaggctgagagcgtctgagagtgccatttcctttttctcatatactgttcatatgtttccaactgtgactccacaccaaggaatttggagtcatagttgacgttaccatctgcccactgggcctcttatagtctccactttgccaagctcacagtaaatgtctcctaaaggaaatgcatagagctactttgtagttcattttaaataaaataataatgattatcattaaaatactttaaaagcaaggtatgcttttggtgcattttaagaagattggtttgtttttgagctggaaacttaccgtgtaacttaaggtggtctccaattcaaaaatctgcttgtgtcatcctcccaagttcaatgccagccctgaaatagaataaaggtgtgggccagctaacaaggcgtgtgtgtggagtacttaatggctgaaaatggattttcatgcagctcctctcattgcctttgacataagaattgttaaatggacttttctcatcgaaagaacagggcctaagatagatggcttcttctaggtttccctgatggtaattctagttatattgaaaattatgactgtatcttccaatgatggaacccggttcatatcttatacatcaaacctttacaaggacaggtagcatttagtaaaaaaaggaggggagagagtcaagatagaaacctaaaggaaagtaatgaagtttaattctctggccatcgcttggcagtctttgactaatttaaaccccattcttctcttctatgctgtgtgcacacctgaatgcacacctacaaagtttcagcatccttttactagctcctggaacccacagtgtcactgctatgtccagctctctgttcaataaacacagtcattgttgtgtcaaatgtggcttccgccttacagtgtattaatacatagaacacttccttaatctaaattggaataaaggaaacaaggaaacatacctgtcaggagaaggtgctggagtgggaatcataagggcttagttcagccttggggcctgtgtcacaatttttatgccttaaagcaccagagtatatgtttttttttctattctatgtgcactttatggtgtatttataagccaaagtgatattgttttggtaataattttttaacttagaaatttatctttatttctatgtttgtaaatacctgggcagttttgaatgctaactaattatactttaaatatgcttcaatagctggtcattaaaaaatgcacttcttgaaaacatatcctaaataaaatgtcttaggatgaagtcttcaggctgaatttttttgcttaaatatttggattggctcacagtataaattttccaagggcactccagacccaattctcacccttccaaacatcatattcagaagtaatgaactaatattgatacttcattgttaataaacaacctttatttatgtttctttggcttttagctcatgacctttcctgtctgaggagcccaggcaataccacatcgaatttgatgagagtatttccttaggtgtcctttggatgtgacagtttaccaacctttctttgttttcatgagttggaaaagctggggagagctaatgaggacttttgtagaatgtcactcagttgggatttttttttctttttttttttttttttgtcatgaatagacaggtgtgtgagtatttgggaggaaactttcacaggtaaagtacaatagttgactgccagcataatttacaacaatgatgttagacttgaacacctcatttctgtaatggttaccagttgttttccctttaatttactagttctctccatactgtgctctaagaaaggactcagtgtgaacagcccatattgaaaagagtagagtagttgccctcaatctccttaaagttgtagtatcacaaaaattatttgaaattctttgtgagttatttatctatttgtttatttgtcagtatggattcttagatacttatttatgttttagaactgttggattctatgtccctgtgactaaaccccatcctgtatgccactcttttgaattcagacataactctatcatatgtaacccctttcaaattttccttttttcaaattttcttttttgacattccaatatgatccattttatgtatttctcagcctagtcctaagatctttcatttcttcaatgtggccctgcatcttctattgagggatgatattaaaagtcacaatctatgatctaggtgtatcttgcttctgtatctacttagctgtgagaatgaagatgtgtttgtctatattcatagacacataattatttcagtgagctatacagttattaaaatttaggaaacagacacagtaaaatgacctagactttggcatttcacaggaaatcactaaaggaaataaaccaggccatgttaatggacagtaaaactaggtagaggttagaaagaatatgaggagaatgtaccataagtcaaatgtttctatctggagtcttgggctggatatgtctgcccaagcattttgtttggctcatggaaaactttgtaaacaatttgaattgcatcactgagtaaaaatacagtgggatgtcaaatgtaatgctcccttttagatgctctgagctttgtcaggcctgagactcccacacctgtgctgtctatttgccaattgtcttccacttattggcagtgccaaccttagtgaggaccacacaagcacctcttttccagaagatttactcatcccctcatccaactcaccatctcctgtgcactgggagccaactcaggccccaaatgctcatgaactattgcttctattccaatatgaaagaaaggaaattatgtttttgagcccatggctaacaaatttggaaaatgagaaaaataatttcatttgtctaagtgaatgatatccatatttaagtaaaattgtgaactctattgagatactacatgcaattccagtactaaataaacatttctcagtagattttaacttctgcccaaatcctggttctcaaatgataatcatgagtctgccttcttagccactccttcaaaattgcataagtaatatgaatcaacataaaagttggatctggagggctggagagacagattagagggtgttgctcttgcaaagaacctgatttcagttcccagacccatgtcacgcagttgataactctgtgtaactcaagctccagaggagccaatacctctggcctccaagagcacctgcaacatgtacatatacctgtatagagaattaaaaacacagaattacatacctacccagaattgaaaataatgaacctttaaaatttgaatttgtattggcctgataaatatgctgtcattataagagctacatattaaaatgctagaagatatttcttatgtgaagatagaattttatttttgacaattttttttgtatatcttgaagtatactgtaccctgtaaaaggccagttatctacctcacacactttaactacatctaaaggctgagacttgtggctttgtagagagtttggttagttttaaggctgacggcaggaagcagtggagtgctcatagtgcatgaatatggccctacattcattccccaacactgcaaagcaaaacagcaaagcaaacaaccccaagataggccaatttacctttactgagaaaggatatgaattaagaaaaaggtattaattataacaaatgtttctgacatgctaaagatataaactattgtacttgacatttgacttctgccctagcaaatattatgaaacaataaaaatctgagccatcaatagtcaaagtgcaaatgaaatccagattgtgagaatctgggagtgaagcaagctggcagctccccaattgttactgactgatctaaattaagcatattttacaagacaatgggctcacaatatgatgcaaaaaggtattgtagttaagtgtagttaaaaaggggatgaatttagttaaattcaaagtattaaaataaatgtagcataaagtaaaaaagtcacttgtagttagacaacattaaaatgtatgtcaagtatggaaactcggctttcttctttcctagcctccatactagtgtataatgtgctaggattgtatttcagaatgctcatatttatctctctgcatatatggatatacaaacataaagtttcaccatgtttgcatacatatatagttttatgtgcttataatatttataaaaagaacaaaatctatagctgccaatgtataggtattgctataaaagacaatgtctatatacataatacatagatataaaaactatatacaaatatacatttatcttttacctagacacgtcgtacacacacaacaataatgctttcaggagattttaattaactctcttgaaactgtgtttgagggttaattacatctaagatgtaaaacacaactatggttagcatgtcgaaagttcttaataaatggtagcttcctctcaccactgccaatttaaacaagacatttaaattcacacatttttttattttactgtcaattatgaagttattgaagagaccagtattgagtgttcatttgctcattatttgacattaacctgaaaaattttacaggtttttggattcggctttagtgtttgcaatctaagaacaactggaaagctaagattagtctgtgcattcttcacaataaaacactaagttttggtttttacaccactgtttgtaagcaacagtcatgacaccaatgcatggggttcatcagaagtcattgcactgcctcttttgtgagtggaagtggtagttctcttactgggggaggcattggccattgaatggaacactcaaagtgcttgggttactgttacaaacccccaactgcatgtaagacaataattgtccataaaccatttcagtcataatttacaaataactcaaatatctaggcttgggaagaagaagtttcatattgggttgagattatagcatatgaccatctgtggtaggttctatttagttgtctagcctaaattaaaatttaattacttaaaattaaattttaaatcaacccttctttcttaccttatttgaatgtacctatatttgtaagttgaaatagaaaatggaaataggcaagtcaggaaaattcctataattgaagatttattttatagaatataacatcattctattttatctgttgtgtctgtctgtctgcctgcctgcctgcctgcctgcctgctgtctccctctctctctttcatctgtcttttccagataacccagtgttgtggcattggactatagcactgtcttcagtggaaagattactttggaagctttgcaactaatgcttcttcaaatgtatgaatttgcagcttcatgcaggagatagaggtaaaaagagaagcttggtattagagtaaagcttcaggcagagtttccctgattctccatccattctttcatccaatgttaagggatgtacttagaagtgtttttataaaacaattcacttaatttttctggaatctgtctgtggctgttgctttgtaatactttgattccagaaaggtgttttatgtataattcaaacacttcatgcactgaatgcaaatttactttatgaagaattattgaaaaatatatactataatagagtccaggaagttgtcaaccagttttgtttacattgtcagttaccatagaggacatttcaggctgaagctataaattactattgcttctataaaactgtctgactggagggaggatgtagtgttaggtgtgggacacatactaataactataactgggatgtagaaaatcccaaatacagccacctttgtggattcagacaaacctggtcagtgcaccgattagtttagtcaatttcacacaaccctgagtcagttgggaaaagggaacctcaactgaggaatggcctctactagactggtctgtcagcatgtttgttggtcattttcttgattagtgttgatgttggagggtatgggccactgtgggtggtgcccccctgatggctgaggacccagggttatgttagaaaacaagctactaaatagattttgccatgatctttggatcagttcatgtctctaggtttctgccttgggttcccaggatgatggactgtcactgggaagttcaaaatgaaataaaccctttcctcctcaagttgctttgtgttattgttttgtgacatcaactgaaaagctaactatggttgtcagcatgtgatttcaatatatttttcttgatattttgggaaggttgaggggctgtatcctcaatagactgacatgtaggagcagagttcaagtgcatttccccagtcccttgttcagagagcctagccccccacatctccaccctggttgccccaaaaataaagaaatagggcatgaactcttcagggcagagcaaggcagtgtgttttctttttctttctctctctctctctctttctttctttcttccttccttccttccttcctttcttttgcagatttttttatttgaattagaaacaattttttttttacatgtcaatcccagttccctctccctctcctcctcccctaccaccccatcaactaaaaccctacctatcacatatcttttctgttttccttggagggtgaggccttccatatggggtcttcagagtctatcgtatcctttgggatagggcctaggcccgccccccatgtgtcttggcttagggagtatccctctatgtggaatgggctcccaaagtccacacctatgctagggataagtactgaactactacagaaggtcctgtagatttctgaggtttcctcactgaaacccatgttcctggggtctggatcagtcccatgctggtatctcatctatcagtctggggacagtgtgttttcttatacaaaatataatttcggaacttctgttttgacactgacacttaggtggtgggttgcatgtctttctacttgctgcccttctttcccctcttctgttgataggactgactgacccttcttagctcatagtaggctgcctttcagatttgctgtgtagctccttaaccactcttctgataaacttctgtgttctttttctagcatccctggggattcaatcttgtcacttgtcatttttctgctccctgaagtaaaggcattcaagatatcacatcaccaaaatgaaatccagtcctgcagtattagcttaaactctatgtttggaggcagccagggctctctgacattttgtctgcttccgaccaaagcaatctctaccaccatgtccaaatgcattccatcctggacatcttaatctctgagtaattgcttgtgtacttcctgagttattatctctgacactccttgacagtaatacttgggcacagttgatattaatttattgctttgacaatgaatcagctgaggagttagcattatataaaatgcattttattcctatatcttttgttattttactttcattgttttttagtcctattattctttccaaagaatgttagtggtatgtggttaaaattaaatgcagttatactgttagaaaactaagatggctttaacttaacactgaaattcgtgggtaatgtgtttttcatctctaaaagtgtacaaaattcattttctctgattaacaaagtttttaaagtgtacaactaagtttgtaatctttcccagaatgttttcataggtttatttctttctttgatgttatgaagttgtccgtacaaaaatgacactgttattcaggaatgttgatgtggtaggaaacttctacttatgtctctagaatctaggccatgatgacatatcataaaaatagatgcaaaatgtggctgctcttgcctcttggtgtccatgaggttgcttaatcacacgtctgtacatgtcagcagttaattttttcaaaagtagatgttagtatatgatgatcaaaaattaaaaaaaatccaatggagtgacataataccaataatataataaattatttatcattctcagaactaacccctgttcaacatttatttgtcattacataaaattattatttgaaatattcaagtattatttattgatttacacatagaatcctttcctctagtttgttttcccaagtataagaggcaaatttaattcagaggaaaaaacctcttggaatgacttcaattttattaaaacacatttgaatattgatacttgtcaacaatgccttaatgcacatttcattagatttgctagagtttcatctttttagacaaaagtaggtatgatcagggtgtctttttctgaaatcaatttcacacacacagaattttgtgttttcccatggttaatggatacagtgctcccagatggctttccaacccccaacagaagagacaggaaagagagactggaaaaaccacatgtctattttctggggggcagtttaaataccctgtgggagtggtcttgagcatctctggaggaagggtcatcatttggtggctttctgagatgcggcagggtttgcgggagggggggcttgggtggaacttccaccataacattccagactctttgggtatatggatgccaggggctggggtgaagcatccaccataatgtagacaacacaggctgggcctagccctcagccttccagagctggcaattcccaccatcagttttctataaggccttgttaagttcatttgtgtgacatgtttttcttgaggtttctttttatgtgtggtcaattctaccctgtgataaaacacactgggggaccgtagaagcatgcaggcactctgggagacctttgcaacctaccttcacaccagaagctcactgacctgatagaaaccagatctttgcagagttgtctttgaacttactgaacactcttggccagtaaaggactttttgacttcagaattttttactttacagagtgttcaggatggtggtagctgtcaccagcaggctttcctatggaaaataccagttagagtttatctctgttgccacaaagagcagccaggaaaagccctcaatgaaaatgatcatactggggcatgacaatcatctgcttcctccatttaatggaaaggacatcattggaagaagagcttgttgtgagggaaatggtaaccatctgcacccaaactatgaggaaagcgtcaaataaacagaactttccagactcaaagcaaaaaatagaatcagtaggagcaggagataggaataagtattaaaaaaaaaccccaggaaacaacaacaaaaaatacccctctgtgtttctgattgagagctgagtttgagaagcagcaagttaaaattaaggctaaatttaaaatgaaattaaaaaccttcaatttgagagatacactgtgtttaaaatcaaaaaacacatataattctcatgggactgaatttcagtgaaatgtttgaattaaggaagtaaaagattataaatatatggtcttaaaaataacctgaagttttaaatggctctgaaagacaacctgtcttcctatcccacaagcaggagcatccactctttaaaattataactggcaaaatatgggttatgttggcagaaatctcagaagactcttcatcactcaagagcctcttgtcaagataccttgtaattagctccacaagtctccatctgtgacgatgttaaacacaggtgaattgctctgggcaagttgctcaggtattgtgatgttaacggaatcaattaattgctatagcggctttgtagctttgttcagtatcacacactaactcagagacattcttgccctgcagaaagcatggtcttcctcttccctacccttgtcacttatgcacttgaaatatgaaggtttaggtttgtgatattgttcagcactgaaccaatcccagtgtgtcctgtggaatggcaggattcctccagccagttatcacagtcctatgtgaaggggtctctgcccacacaccgtaatgtgacccttattttcccttagtggacattatgataggccccctcctaaagagagcggcctcgggattctatttaaatttacataaaaatggttgagtgagtgaagaatttttataattatttttgtaactattcaatttgcagcacagttggaagagatgttgtactgggcaaaagtttaagcataaactgaggacccaaatattcatttaacaaaggctgcacatcatgtaatttttcatggccagagtggaaaaagtaaaagaacatgaaaaacttaggtttccctaattattcggtgtcttcctcctcattaatgtttcccagtgcctattttacctgccaaaatataactgaaatcttagcagttaggctgtgaatgtgcctctctccattcttccttctcttgctctggggtgacagtgtcctactctctctgaagatgcaccaaaccaagcacaccagtaatctgtttctaatactccacaccagcattccttccaacactgtctctttcaccactactcagcccccacctttctctgtaggatccgcaggatctggcattaactcaggataacccaagacctagttagcacagacttatttaccccagagggactgagggcagggaatgagagacaaagaaaggggatagagaactggggagaggggcaaaggaacaagggaatgggtcaggggtatttgtcctggaaggaggcacaaaagcctgcctccggatagagaggagagagagatggcacacaggcaaatggcagtttatagaggtaaaaggatgaggtggttaattttaattgaacatgttaattcagtaagtcaaaaggggtttttgaagctgacttcaataagttgatggcttgatcttgttagtcagtctcaggaagagaaagtggccaaaaatgaaatagaccttagtagctagctagctttaggaatgtaatatatcttttttttttttcaaggcagaggaaatgagcaaggcttaccagagccatgtttgccatgctcagtctggctagagtctgttcactttctttcttgagatagggtctctctacatagccctggctgttctggaactcactctatggctggccttgatctcatagatagctgcctgcctcagcctcctgagtgctaggatcaaaggtgtgccccacttttgtctctcttcttttgttgtgttttcttttccctactttacttgtaatcatactgacttatgtattgtttcttttcagttctcagctgatgcagcaccgctacctaaaagattaacccaatctccccacaaagtgccataaacaagctgaagtacactccctgacaatccacagtagtcagtatgatgcatcatgaggtgggaccatcgatcccacggcgggggacaaacacagttactataactgttgtgtcaagatccttgtcattatgcattttagcttcttattttgatgccttcttcattagactatctctgtttggaattgtgatgatacattttctagagtatagttgaaacatgtcctcaacatttgctgggttataaaagccatttatactctgtatgcactgccttggcattccttgcagaattcctctatctaatattttggaggacagttttgttcctgactctgccaaggcctttctaatacccctatacaacaacaacactgtgctggatatatttacttgaatgcagaaatttacatatgtatatatgttagaattttatatatgtacatttccctctctattccctacccctctcaattatggaagttttataggtaccactaacttcttggattggaacctggtgcttgctacttcagtctctgtgatcccaatgtgccctggttagttgattcagtgggtcatgttttcttggtgcctgccattacttctgactcctataatctttccttctcttattcctgggattccctgagttctcagggtggggacacaatggacaccttcaatttagactttctctccccataacagacaaggtctttcaaggaacctagagttcatgagctcagctaaactgaatggctaaactccagggatccacatccaacccctcagcactagtgtaatagatgtgctctggtccaatttttgtatggatgctgaggatatgaactctagttcatgattgtgcaactacatttcacccactgaaccatccttcaggtcctatatgaatgaattttaatgaggtaacttatcagtattttagtaggagcatgaatttgatatgaaaactccccattacacacagttttatcattgtgaaaatctatgtattctcacattgagataacattctttttgctgtctttatcatcacctttaatgtttttttttcttgttatggaatattagtttaaaatgtgttacattcatttaagctgtggaatatttgtttaatgatgcaaagatatgttgcattcatttaactgtgtaaagctgtgttactttgtctgcctaaaatacctgactgctcaaataaagagtcaaatggccaatagctgggtaggagagagaaataggtggtgctggcatgcagaaataataaatagaaggagataagaaagaggagtgagaaaaggagaaggaaagaggatgccaggggcacctctacccagtcatgcagccagccatagaaaagaaggaaagaaaggaacatagactagagaatggtaaaagcacagaggtaaaaggtagatgggataatttaataaaagctggctagaaataagtcaagctaaggtcagacattcattcataagtaagaataactctccttgtatttatttgggatctaggaaatgtgcccccaaagagtaaaaaacaactccccccaaactgtatttactagcatttataactctcttttatatttttaacttgaaatctttaattactactcatatttacatatccatcccgcaccattccctcaccctcccagcctcccatgttccccaccaacctcccctacccatcccccaactccttcccagggatagtgcggcccttcaccagggaccttcaaagtctgtcatattgtttgggggaaggcctaggccctccttgctgtagctgggctgcaatagtatccctccacagggaatgggctctcaaagtccatttgtgctgtagggttaaagactggctcctttgttacaggtcccatagactgtcttggcctcctagctggcacctacattcagagggcttggttccgtccaatgctgtttccccagctttatgactagggtctccatgctttcactaggtcaggtcaactgtttctgcagcaccatcttggctcctttgctcatccctcctccctctccataattggattctaggagtatggttcagtgcttagctgttggtgcctgtttctgcttcgaacagctactagacgaaggctctaggaatggtaaccaaggtagacaccaatctcattataggggaagggcaaaaatggcattttctccaccactgcttggattcttagttggggtcatccctgtggatcccctaacatttcccctgtgccagacctctttccatacctgtactgtctacctctatcaaggcatcttctttcttgccctcctctattcctcccctgtctcagtcctcttgttgtccttcccctccccacctccttcctcttaagtccaataatgttaaattaaattaacttccaataaattttacagttaattcctttaaaagaattagcttttaattttatgacttttttggaaactttaaatactagagtttatagttcatcatatgtaggcaggcataaggttatggcttgaagggtatattcaccacacatttcgtattccttcaactcctgactaagataaagtgttcaaggatcacaaagcccagagctcataggcacaaacaagctaattttattgtatagtatgagtgagaacattgtgagcacaggggaactgatactctgaggtagaataatgttgagcacatgggcactgatactctgaggtagaacagtgtgagcacacgggtactgatactctgaggtagaacaaggttgagcaaatgggcactgatactctgaggtagaacaaggttgagcaaatgggcactgatactctgaggtagaatagtgttgaacacatgggtactgatacacttgcagcttgatgtggaaacagacaatgatttcttggagttcttaactcacagagaagtctaggaacacacagatgggtttaacgatgcctaccaatccagaacctacagacaccttcttctcctatagctgaaccctatactatcagagatggagactgttggaaataggccttctgtttctctctcagtcaggcacatcttatctcatttgataatacagtcatgccaagaaggtttgagatcatgaaaatctcatagttgacaaagaccttttagtcatcgatgtttcattaatgtcacaagaacatccaaatttacccaattaccttctattatgcaaatactcaagtgattgcatttagattttatagaggacatgcttatagtattataaaggaacacctgcaatcatatttttccttttctttcaaattcccaactaatccattgcacacaacaaacacaatgaggacagttggacttgtgctgtgttgttagacaatgcttgctttcaaattcctttacaaagccataaaaacaaacagaaaccagaaacagagttgggatatttttctttttaaaaattttattatatttattttgtttatatattatatgttatatatatataaagtaccttcccccgcctcctctctcccccagatcaattcctgtttctcttaaaaaaaaaaaagcagacctcccagggatatccattgaacatggcctaagaaaatacattaagactgggcacaaattccaatatccaggttggatgtagcaacccagtaggaggaaagaggttccaagctcaggcaaaagagtcagagacaccctgactcccagttactgggagtcccacaagaacaccaaactacacaatcattaggatgagttcttaaaactagttaagttttaagactttaaaaaaaaagagagaaagaaagtaaagagctttgtattatgtaatttaaaaatgtaggtagttgatagctttaaattttacttttcaagttggatatttcccaaatttttgaaaacaacattatctggttagttaaaagaaaacagagaacacaatattattgtttgttatgaaagagagtcattcttatgcagtaaaagcagaatattctgggggaaattaatttcctgtgccctataaactaatctaaaaaggaaaataatagctggtatgcagccatttgctaaccacattcatgcaaatatctaaagacttattcatgacatggacttggtttccccatcaatatcctacaggatctcaggaaagctgggggaattttcaccggatattaggatggggacatttggtggctgcatagaccatgcctctggagatgaaatactggccattaagggtcaggaactgaatagaaagcatggagctcacattcttccctagaataacaaccgtagttttaaacattgatcggtttaacttctctttttaaaatgtctaaagttattatcttttttttttaatgttaaggcacactcgggcttctttccttcatgcaagctctattatccattatattacatccagttaatcaaattccattagattttgaatttcaaaattttatttctgcaaaattgtattctctcaaaagtagaaatccagttgtctaatgaaatgttagaatgatgagggcataggtagcttttgagtgtgctttagaaagttactatttttaccaaaatctctcagttcctcttttatgtcattggtcattggtattctcccttcttgttctacccatatgttactttgtcttttctaaatgattatttcatgggatccctctcactatccaggcagtctttttcactgcaccgtatataattcctttaccttttcaaggcctgcttaagaatctgttcttccttacattcaaaaatttattaaatttgttcttggactattttgaacatttattctatgcatgctgaccactttcattccttaccatccttatccatggtctcttctctacttaaatatttctcacatttagatatatttggttttttttttttttgcgaccctttgacataaacaaggactgtctgtatgaccatgcttttggacctggtggactcagcagcaggtacacaactgaagacgtcaatacatcttcttccagtatctatcaagagcccctagatcagcagtaaagagtaccagcctactgagctgcctaacctctcccttacttccttggctggtgggagtgttgttcagtatgggtccagtgcagataactagagttgtgaattgatggttgaaatggttacattgagtccaaagaatggtattttgcagcccttcaccttattgtccatctctttcatattttctgccccccattccacaataatataatgtttaggtcttagaggaggtgaaaagcccgtatgtatgtatgtatgtatgtatgtatgtatgtatgtatgtatgtatgtatgtatgtatgtatgtatgtatgtatgtatgtatgtatgtatgtatgtatgtatgtatgtatgtatgtatgtatgtatgtatgtatgtatgtatgtatgtatgtatgtatgtatgtatgtatgtatgtatgtatgtatgtatctcccctgttgttcaggtcagctatttctgtgggtttcaccagcctggtctggacccctttgctcatcactcatccttttctgcaactggattccagttcagttcagtgattagttgtgtctgcttctacttccaccagctgctggatgaaggctatagcatggcatataagacagtcatcaatctcattatcaggagagggcatttaaggcagcctctcctctgttgcttagattgttagttggtatcatcgttgtagatctccagacctttcacttgtgcctgatttctctgtaaacgtaaaatgtctcccccaattatggtatctcctttcttgttttcttctattcttccaaagtggattttctaagtctaaactaaaagtgaaatcctagtatgagtttttgataactatcttaatgctcagtgtttactaaattctaaattagcacctgtgaggagtttatgttttcaaactggtcattgcataatatacttttttaaaaaatggaaaatgttatgaggatataattcagaattcttaatctaaacttgaaaattggctatggaattggacttggaaaaacacatttatagtgtatcctacggttgccagagttagtcattggcaacaaacatcccctccctgttttactgtgcacccctgtcctggcttctgaggacattctgcagaatgttgagtcatagccttctcccaagtcacctactgtggacatactaacagatttagaaacaagagtgacattgttccccccttaggcaagggaaaaatggaaagatggtaaaggaatcacagtaggagcagtgggtttgaggaagtaccatgtttcttcagatgtatgctggacatctggcagacaaaacatgtctgttgccagttgccagcatgagccaggaggaacactattacacatcttggaaaatggtttttggaatgaaccattttggattttgactttcttccttaaagaaagaatgaccttcagcacagtaaagaaaggaaataaggcattacagaatcagcatcactggaggttttgatgccccttctccagcctaggttgagtggtattccctgagtgttccagcatccgggtttgccccaggtttatgtttaaagaatgatgtactatcagcctagttcttttgcctcattgatttcttcttcagtctgtaatggcaggaaaaattgcatccactaccttagcttttatttccagtgcttggcataacaatagatgatagatttttgttgagtaaattatcaacaggtgggcattatattattttatggtctctttcatggataaatttattttataatatgaaagcatttttattgtaaaaggtactgagcaactaaaacatttaagaaagaatgaacccacacagggaatcttgacttactcactctgtgtgctacaccagagggctccgtttttgattttcagtattggatttctgctctcttcctgccatgtaccccaatgatctaagtctaaggctcaaaatctgttccattacttagtaaggattgatgaatatggcattttcctttaagataacttaatgccacatgaaacttcttgtttctttcactcctcacttatttgatgtctgtttttacaaaggcatcctcaactcatttccaaatgacagaaggttgctgttgttttacagtctaggaatgtctcagattaatgttttcaagatttagttgtaattaggaatataaacagaattaagcaaactcttgccagaagagaggaagattctagaatactatttcaaaaagctcctgaagagcacctagagtgggaagatagaattgaattcatgagtgtggttgtggtgccctgaatgagacgagtcctggaagctcttttatttgaatgattggtcctcagttgggagagtagtttggggaggaataggaagtttggtcttgtcagagtaggtgtgtctgtcactgggtggaggggttggtgaggtttcaaaagcctatgcccaggtctctctctctctctctctctctctctctctctctctctctctctcgtgcttgtggatcagatgtaagctctgagctactgccttgtgccgtcacctcctgtctgctgctatgctccccccatgatggtcatggactctaaccctctgaatctgagaggcttcaaattaagtgctgtctttcgtaagttgtcatggtcatggtgctttgtcacagcaattgaagagtaactgagacagtcaatgtacatgtagaatttagaatgcatataaaggacacatgtgtgtaaaccttcacaaatatgtttctaaaaagacaatttcataactttccatagctcttgtatattttgttatttatgggtaagaagctgaccctaaaattctcttttgctggtcccaagtttgttcttgtagtagataatattcattaaggtttgatggataagtgaatattgagcaaataagttaattgctatttctttttcagattggttaattcattgggatacactcacatttcacggcatattgatttataatacccttgaagtatttcccctccaaattcaatgctcatttaaaaaaatatttttatatgtttatgagtagagaaattcagcatacttttactttattagtttagtggcaagtcattaacaagaaaaggtcctaccttatctttcagtacaaacttaattttataatccacattttaacaaatatttatatattcttatatgattttcacattggttaaatgctttgttagcaccacataaattttctttagctaattggttaacaactaattactgtaaaaaattgaaaatgttaaatcttctcatgggaatttgaaaaaaatgtcaggggtgtactcttcttttatattttcctcaaagtcttggtgtttcgatgaatttgcaataatgattaaattaataatgaaaaatagctaaatggtataaaattaatacttgagagctttaaaattatagcaaagcttatgcatattcaccttccctctgtgtaagacttttgattagttcttgtaagtatggaacacacttgaaatatacaaataaaatgttatttctttgaaaatcatgtaatagcccaggattaaaataaaccatgtttgcatccagtatggtctctatcttactattggcacaacaattggctttagaatgaaagatatattctaaagatatatatatatatatatatatatatatatatatatatatatannnnnnnnnnnnnnnnnnaaagaatcataagtaaacaatattcaccaaattaattcaacaaaattcctggtacagttttaggatatcagcatatgttaaggagaaaaaccaaataagttatggagttgtaattgtatcgtgaagagaccaacaatgcatacagcagtgaaagctatcacataaaggaaaagggaaagcaggcataaagggagagtgaagctagatggagtggtggtgacctataatcctagcacatgatgggctgattcgggaggatcaagggtttaagtctatcccaggtctaggctagcctggggacttagtgcaatcctgtctcaaaaaactaccacaaattaaaacaaaacagaataaataaaggagagagtcccaagcatcagtggatttgagcatcatggttttgtgtgtgtgaagtagtcaggaaaagtagtgggctttctgcagaaagtaaccttcgactgagacctacaggtgaagaaggaaatcaggtaggcaaatatttagcacttgatcttagctcaaatgctgggcagctgcagaaaatatgtgtgtgtgtgtgtgtgtgtgtgtgtgtgtgtgtgtgtgtgtgtgtgtttacaaaggatagatatttattcatacagaaattactacttagatctctatataaaatgtttatatattatataattcatattaaacacatataatgtttacttgtataaagtatgttagaaccacctaaatactgtatgaagataggtgaataggatcacatcattctctgtactgtttttgcatctattcagggacttgagctgtgtattacatctctgtgtgtgagtaaactaacaacaataacaattccttaacagtctgaaagtccttgcagactgaattatagatgagcattgcacaaaggtatgtgtagttttagcttcataacttggccacaattgtttacatttccaaaaggcacatggaaagaaacctaagtaatacctaataagcgagtctttgcttttcatttttttccattttaagtcaagtaaaaccagaagttttgttagttaacctgaaaagcttttgtgtatgattaaaaaaccttcaatggcagtattaaggaaattatctctgtcataatttaccaagcctgtttatttgtaggatgccctgcaattgtgtgggggtcatcttctttgtaatttctcagatttttcatgttgttttagattataaaataaaatcattcttaatggaacaggaatttagctcagctcaataacctttggatattatggtaggcaattctttcatccctgtgacagaaactcaggcaacttaagggtatttttgttaaaatttccaaagtttaaatcagtgctcactggatgtttctgcttcttggcttgtatgtggtgagacagtttcagggtaggtatgtgtagagataagtggcttacctctggcaaactggaaggagagagaaaaacttacaggaagtggccagagccagtgatccacttcctccagccccactccatgtgataataaccaattcagctgtgaacacagtgctttgatccattgatggagctagaacatgcatgacccagccatctctgaatagagcaagctgggaaccaagacttgggcactccctattcaaacacaaatgcctactcatgttcacttagcccagtggcaaagagcacagaaaatgataatttggacgaatatcctaaaaatatatttgcacttggtaccctattacaatcaaagtagatttaacaacagaacccttctttactcacctacctgcctacacgccaggagcttggggctgaagtgaaaacttcagttagaggcttcagatgcctctaacttttaaaggccgagaaacaaaggcatggcatttactcctggcatttactcattagaggctaaagggaaaaatgagtgcccttcttcttgtcttttcccatggtgattggcgctctagagtggaaggtactttgatcagaagagtctctggaagccaggctaagctgaagttggccatccttgctagagacagtgtctgtgtccagagagatgggtggtactgtttgctgttgtttcctttgtgccacaagaggacactgaggtcagtatgatagacagagaagctttaaacaattgtatgccagaccttcacaacccagtcaaggaatgagctgatctccatcaggaatccaattgttcttcaagataagctgttaggaccaacactttcttcttcctatctgatctcacagaggtcttgacaccagagacactctgtcaagagccaccttgttacccatttcctttcaattcaaaacaactatctgaagaccatgtcctctgggaatttaggtgggaggaaagatatggaagtgctatttttcaataaatgttcacaggctagatatttttctttgaccaccatccatgctatgaaacagataaagtcataaggcatcagtcaaaattcctgagatgggcactattttgggtcctaaggaatttacagctcaggagaaaaaaattgatcagaataaatatttgtctgagtaagcaaggagaatttattatagtgtaagggcactacataatttctacaggaaagaccttcagtatttaaaagcccttaggctatttgcaattatagttttaaggcatgatagtaatattcacatggatttaaatcattttcttcaggttctatgaagaagaacactagttgcatgatttaggaagcgtgtatctctgactcagaaaggtttcaaaacacatctttcttttatttttcaagaatttatttatttgtgtgtgtgtgtgtgtgtgtgtgtgtgtgtgtgtgtgtgtgtgtgtgtgtgtgttgtgtgtgtgccatgtgtgtggggttaccccttcgatgcaagaagaggttattgaattcctcggagctggagttacagggcattcagggcattatgaactttgggtactggaaactgaggagtagcaaattagctcacaacccctcctaatgtctctccagcctgtcccctccttccccacctcttttttttttttttttgagattaggtgtcatgacataccctaactgactttgaacttgagatcttctatgaagttatcttttgcacacatactatatatgaagggatggtaatgtggagcatgttagctcatagatggcaaatggcagctttaaaatctagtttgtaattgtttattgttataagatgctgggattgctctgccatctagtgattaagaactggatttagacaattgaattagaaagcacacaagatttgtaagaaaacagatctatgaaaactttttataaatgcaggaaaattgagttgatttcaagtaaaatatgatcaaacaaaatacatttctccatctagatacacatgccagggctttgtgggtgacttcagaatggagtcagtctgctggaatatttagtaaggggaaaacaattctgtagcttggaagttaaaacatggtaaaaatatggccagacttcaaccacttttaaattttagaggcattaataaactataagtagcaaaaagtgtaggtagcataaaattacagatttgtagggtgtaagtgtgcctgtatgtgtgcgcatgtctgttttctaggactcaaatctagactctagatgtgagcctggattatgttctgaattaagtagcagagtcttgaggcactattagagttattcatactctattttgttattcatacaatagttatgtcgtgaccacatctttgtaattctttcaacaaactggccaccattttgtttcctattctacttttcgtctaagtaaatggccgtgtagaaacacaaaggacattggccatattatacactactgccatgtagaaacacagagaagtgcaagctctctattttctaaccactctggctttacacacatctttcattcagacttgcacagcgagatttcactgagccctctgtgataggaacagattcctgtgtgggcgaagagaaggcatgcctcagtagtgaatgtgggttttcatcttcttgccatttaaaggcatgccaattacatgtccatatcatcttaaatttaattataaattctcaggggaaagagaccagtgatgaatcagagtataaaaccagtttttggtgttgtaatttaaagaaagcaatgcagtgactctttctccgccccttgaattgtgatctcattgtcttaaacttccaggaagaa

(The sequence listing continues in the following parts.)
